(19) United States
(12) Patent Application Publication
(10) Pub. No.: US 2016/0303217 A1
(43) Pub. Date: Oct. 20, 2016

(54) Immunogenic Compositions and Vaccines Derived From Bacterial Surface Receptor Proteins

(71) Applicants: Anthony B. SCHRYVERS, Calgary (CA); Trevor F. MORAES, Toronto (CA); Scott GRAY-OWEN, Oakville (CA)

(72) Inventors: Anthony B. Schryvers, Calgary (CA); Trevor F. Moraes, Toronto (CA); Scott Gray-Owen, Oakville (CA)

(21) Appl. No.: 15/100,867

(22) PCT Filed: Dec. 1, 2014
(86) PCT No.: PCT/CA2014/051146

§ 371 Date: Jun. 1, 2016

Related U.S. Application Data
(60) Provisional application No. 61/910,817, filed on Dec. 2, 2013.
(60) Provisional application No. 62/007,068, filed on Jun. 3, 2014.

(51) Int. Cl. A61K 39/104; A61K 39/095; A61K 39/102

(52) U.S. Cl. CPC A61K 39/1045; A61K 39/102; A61K 39/095; A61K 2039/523

(57) ABSTRACT

The disclosure provides immunogenic compositions comprising a polypeptide comprising a C-lobe domain or an N-lobe domain of a HIBP surface receptor protein obtainable from or obtained from a Gram-negative bacterial species. The HIBP surface receptor proteins have been modified in such a manner that they are unable to bind host iron binding protein. Methods of making and using these immunogenic positions to prepare animal and human vaccines are also provided.

### RELATED APPLICATION

[0001] This Patent Cooperation Treaty application claims the benefit under 35 USC §119(e) from U.S. Provisional Patent Application No. 61/910,817, filed on Dec. 2, 2013 and U.S. Provisional Patent Application No. 62/007,068, filed on Jun. 3, 2014, both of which are incorporated by reference herein in their entirety.

### FIELD OF THE DISCLOSURE

[0002] The present disclosure relates to immunogenic compositions and vaccines and methods of making and evaluating thereof. More in particular, the disclosure relates to immunogenic compositions derived from bacterial surface receptor proteins and to vaccines against Gram-negative bacterial organisms, including, but not limited to, bacterial organisms belonging to the bacterial families of Pasteurellaceae, Neisseriaceae and Moraxellaceae.

### BACKGROUND OF THE DISCLOSURE

[0003] The following paragraphs are intended to introduce the reader to the more detailed description that follows and not to define or limit the claimed subject matter of the present disclosure.

[0004] Vaccines capable of mediating an effective immune response are important in health strategies aimed at combating diseases caused by microbial pathogens. The two basic strategies for inducing an effect immune response in the host involve either the administration to a subject (host) of a ‘live’ agent capable of replicating within the host, or the administration of materials or substances that are not capable of replicating in the host. Administration of a live vaccine may represent a safety risk for immune-compromised individuals if the agent or a contaminating organism replicate and adversely affect the immunized subject. These risks are not associated with vaccines based on killed whole pathogens, based on extracts from pathogens or based on purified components, commonly referred to as subunit vaccines. Subunit vaccines avoid the safety problems associated with live vaccines but the purified components may not by themselves deliver the desired protective effect in the subject against the infective microbial organism and require appropriate components, termed adjuvants, to enhance the immune response.

[0005] Approaches to the design of vaccines against Gram-negative bacterial organisms have commonly focused on the use of proteins that are naturally associated with the outer membrane of the bacteria and exposed on the surface of the bacterial cells. Particularly attractive targets for vaccination are proteins presumed to be critical for survival in the host as they cannot be lost or dramatically altered in order to avoid the host immune response. In this respect the bacterial surface receptor proteins capable of interacting with and binding to the host iron binding proteins, transferrin and lactoferrin, have for some time been considered suitable components for use in the preparation of vaccines (1-3). This group of surface receptor proteins, hereinafter referred to as “HIBP” (host iron binding protein) surface receptor proteins, is present in pathogens of humans and animals belonging to the bacterial families Pasteurellaceae, Moraxellaceae and Neisseriaceae (4). Thus these proteins have been recognized as potential targets for development of vaccines against a variety of different pathogens of humans and food production animals (5) (6-10).

[0006] The HIBP surface receptors normally are comprised of two proteins, a surface lipoprotein, transferrin binding B (TbpB) or lactoferrin binding protein B (LbpB), and a TonB-dependent, integral membrane protein, transferrin binding protein A (TbpA) or lactoferrin binding protein A (LbpA) (11). Recently the detailed three-dimensional structures of TbpBs from Actinobacillus pleuropneumoniae, Actinobacillus suis, and Neisseria meningitidis were determined at high resolution (12-14). The intrinsic properties of the TbpB or LbpB proteins are quite different from the integral outer membrane proteins, TbpA and LbpA, and substantially impact on the strategies used for vaccine development. For instance, it is possible to produce and purify TbpB or LbpB at relatively high yields from the E. coli cytoplasm for the generation of subunit vaccines. However, these proteins are notably absent or deficient in outer membrane vesicle (OMV) vaccines prepared by selective detergent extraction due to their removal during the extraction process. In contrast, functional TbpA or LbpA can only be produced in the outer membrane, providing limitations for producing high yields of purified proteins to be used in subunit vaccines. The alternate approach of producing misfolded proteins that aggregate into large inclusion bodies and subsequently attempt to refold the protein from the enriched inclusion body preparations, are also problematic for commercial production. Thus most strategies for TbpA or LbpA based vaccines would normally involve production of OMVs or development of attenuated strains.

[0007] An alternate approach that has been used successfully for invasive bacterial pathogens is to use the extracellular capsular polysaccharide as the primary antigen, and couple it to a protein carrier to induce T-cell help. These conjugate capsular vaccines have proven to be very effective at providing protection from infection by strains expressing the specific capsular polysaccharide but provide no cross-protection to other capsular types. Although conjugate capsular vaccines against the human pathogens H. influenzae, N. meningitidis and Streptococcus pneumoniae were originally developed to prevent invasive infection, post licensure carriage studies have demonstrated that the systemically administered vaccines eliminated colonization by the pathogens expressing the specific targeted polysaccharides (15-17). This had the added benefit of providing herd immunity, providing protection to non-immunized individuals due to reduced carriage frequency within the population. While not the initial intent of these early vaccines, the potential to confer herd immunity has become an important criterium for evaluating new and upcoming bacterial vaccines. However, determining or predicting whether new vaccines will be capable of impacting or preventing colonization (carriage) is a major challenge (18).

[0008] The ability to evaluate whether protein antigens will ultimately be capable of providing broad protection against a diverse set of disease isolates is also a considerable challenge (19). Initial efforts at testing this ability commonly involve immunizing other animal species (mice, rabbits) and then analyzing the cross-reactive and cross-protective properties of the resulting sera. For those surface antigens that can readily be produced in a soluble form, such as surface lipoproteins, a first step is often to produce and purify a set of variant proteins and use them in a standard ELISA (enzyme linked immunosorbent assay) to evaluate the ability of the antisera to recognize the variant proteins. This is fairly labor intensive making analysis of an extensive set of variants an expensive enterprise and relies on the assumption that the binding of the antigen to the ELISA plate is random so that all protein surfaces can be probed.

[0009] Considering the limitations in the various assays used to evaluate and predict the cross-protective and cross-reactive properties of antisera raised against antigens, the selection and design of new and improved protein-based vaccines should be pursued in conjunction with development of improved assays so that optimizing and improving vaccines in development can be approached on a rational basis.

[0010] Despite considerable efforts over the years since their initial discovery (20, 21), it remains unclear whether and how HIBP surface receptor proteins can be used to prepare efficacious vaccines against Gram-negative bacterial pathogens, and in particular whether and how a broadly protective vaccine can be developed. Thus there is a need in the art to improve immunogenic compositions and vaccines based on HIBP surface receptor proteins against Gram-negative bacterial organisms.

### SUMMARY OF THE DISCLOSURE

[0011] The present disclosure provides novel immunogenic compositions and in particular immunogenic compositions based on HIBP surface receptor proteins from Gram-negative pathogenic bacterial species.

[0012] Accordingly, the present disclosure provides, in at least one embodiment, an immunogenic composition comprising an antigen derived from a HIBP surface receptor protein from a Gram-negative pathogenic bacterial species, wherein the protein derived from the HIBP surface receptor protein has been modified in such a manner that it is unable to substantially bind host iron binding protein.

[0013] The present disclosure provides, in at least one embodiment, an immunogenic composition comprising a polypeptide comprising a C-lobe domain or an N-lobe domain of a HIBP surface receptor protein obtainable from or obtained from a Gram-negative bacterial species, wherein the polypeptide is unable to substantially bind host iron binding protein. In preferred embodiments, the present disclosure provides an immunogenic composition comprising a C-lobe domain of a HIBP surface receptor polypeptide, wherein the polypeptide is unable to substantially bind the host iron binding protein. In further preferred embodiments, the present disclosure provides an immunogenic composition comprising a mixture of at least two polypeptides, each polypeptide comprising a C-lobe domain, wherein the C-lobe domains are obtainable or obtained from at least two Gram-negative bacterial species, or from at least two Gram-negative bacterial strains. In further preferred embodiments, the C-lobe domains are obtained from the HIBP surface receptor proteins that are antigenically divergent.

[0014] In further embodiments, the present disclosure further provides an immunogenic composition comprising a polypeptide comprising an N-lobe domain and/or a C-lobe domain of an HIBP surface receptor protein obtainable from or obtained from a Gram-negative pathogenic bacterial species, wherein the N-lobe domain or the C-lobe domain comprise a plurality of β-strands connected by a plurality of loop domains, and wherein at least one loop domain of the plurality of loop domains of the N-lobe domain or the C-lobe domain has been modified, and wherein the polypeptide is unable to substantially bind host iron binding protein. In preferred embodiments, the modification comprises the modification of at least one amino acid residue within a loop domain.

[0015] In further embodiments, at least two loop domains of the plurality of loop domains within the C-lobe domain and/or the N-lobe domain of an HIBP surface receptor protein have been modified.

[0016] In further embodiments, the present disclosure provides (i) a first polypeptide, comprising an N-lobe domain or a C-lobe domain of an HIBP surface receptor protein obtainable from or obtained from a Gram-negative pathogenic bacterial species, wherein the N-lobe domain or the C-lobe domain comprise a plurality of β-strands connected by a plurality of loop domains, and wherein at least one loop domain of the plurality of loop domains of the N-lobe domain or the C-lobe domain has been modified, linked to (ii) a second polypeptide comprising an HIBP surface receptor protein, or a portion thereof, obtainable from a Gram-negative bacterial species, and wherein the linked polypeptide is unable to substantially bind host iron binding protein. In preferred embodiments, the portion of the HIBP surface protein is an N-lobe domain or a C-lobe domain. In further preferred embodiments, the portion of the HIBP surface protein is an N-lobe domain or a C-lobe domain of an HIBP surface receptor protein obtainable from or obtained from a Gram-negative pathogenic bacterial species, wherein the N-lobe domain or the C-lobe domain comprise a plurality of β-strands connected by a plurality of loop domains, and wherein at least one loop domain of the plurality of loop domains of the N-lobe domain or the C-lobe domain has been modified.

[0017] In further embodiments, the C-lobe domain or the N-lobe domain is a C-lobe domain or an N-lobe domain of an HIBP surface receptor protein obtainable from or obtained from a bacterial species belonging to the bacterial family of Pasteurellaceae, Moraxellaceae or Neisseriaceae, and in further preferred embodiments, the C-lobe domain or the N-lobe domain is a C-lobe domain or an N-lobe domain of an HIBP surface receptor polypeptide obtainable from or obtained from a bacterial species belonging to the bacterial genus of Actinobacillus, Neisseria, Haemophilus, Mannheimia, Histophilus, Pasteurella or Moraxella.

[0018] In further preferred embodiments, the HIBP surface receptor protein is modified in such a manner that the N-terminal anchor polypeptide of the HIB surface receptor protein, or a portion thereof, is removed, and wherein the polypeptide is unable to substantially bind host iron binding protein.

[0019] In other aspects, the present disclosure provides methods for preparing an immunogenic composition. Accordingly, the present disclosure provides a method for preparing an immunogenic composition comprising:
[0020] (a) providing a chimeric nucleic acid sequence comprising as operably linked components:
   [0021] (i) a nucleic acid sequence encoding a polypeptide comprising a C-lobe domain or an N-lobe domain of an HIBP surface receptor protein obtainable from or obtained from a Gram-negative bacterial species, wherein the polypeptide is unable to substantially bind host iron binding protein; and
   [0022] (ii) a nucleic acid sequence capable of controlling expression in a recombinant host cell;
[0023] (b) introducing the chimeric nucleic acid sequence into a host cell and growing the host cell to produce the polypeptide comprising the C-lobe domain or the N-lobe domain;
[0024] (c) recovering the polypeptide comprising C-lobe domain or the N-lobe domain from the host cell; and
[0025] (d) preparing an immunogenic composition.

[0026] In further embodiments, the C-lobe domain or the N-lobe domain comprises a plurality of β-strands connected by a plurality of loop domains, wherein at least one loop domain of the plurality of loop domains has been modified.

[0027] In yet further aspects, methods for eliciting an immune response in a vertebrate subject are provided. Accordingly, the present disclosure further provides a method for eliciting an immune response in a vertebrate subject, said method comprising administering to the subject:
[0028] (a) an immunogen comprising a polypeptide comprising a C-lobe domain or an N-lobe domain of an HIBP surface receptor protein obtainable from or obtained from a Gram-negative bacterial species wherein the polypeptide is unable to substantially bind host iron binding protein; or
[0029] (b) an expression vector comprising a polynucleotide encoding an immunogen comprising a polypeptide comprising a C-lobe domain or an N-lobe domain of an HIBP surface receptor polypeptide obtainable from a Gram-negative bacterial species; and wherein the immunogen is administered in, or is expressed in, an amount sufficient to elicit an immune response in the vertebrate subject.

[0030] In preferred embodiments, the C-lobe domain or the N-lobe domain comprises a plurality of β-strands connected by a plurality of loop domains, wherein at least one loop domain of the plurality of loop domains has been modified.

[0031] The present disclosure further includes an immunogen comprising a C-lobe domain or an N-lobe domain of an HIBP surface receptor polypeptide wherein the C-lobe domain or the N-lobe domain comprises a plurality of β-strands connected by a plurality of loop domains, and wherein at least one loop domain has been modified, for use as a medicament.

[0032] The present disclosure further includes an immunogen comprising a C-lobe domain or an N-lobe domain of an HIBP surface receptor used in the prevention of infection, for example by prevention of colonization, or disease by infectious Gram-negative bacteria, including bacteria belonging to the genus Actinobacillus, Neisseria, Haemophilus, Mannheimia, Histophilus, Pasteurella or Moraxella. In preferred embodiments, the C-lobe domain or the N-lobe domain comprises a plurality of β-strands connected by a plurality of loop domains, wherein at least one loop domain of the plurality of loop domains has been modified.

[0033] The present disclosure further includes an immunogen comprising a C-lobe domain and/or an N-lobe domain of an HIBP surface receptor polypeptide for use in the manufacture of a medicament for the prevention of infection or disease by infectious Gram-negative bacteria, including bacteria belonging to the genus Actinobacillus, Neisseria, Haemophilus, Mannheimia, Histophilus, Pasteurella or Moraxella. In preferred embodiments, the C-lobe domain or the N-lobe domain comprises a plurality of β-strands connected by a plurality of loop domains, wherein at least one loop domain of the plurality of loop domains has been modified.

[0034] The immunogenic compositions of the present disclosure may be used to prepare a vaccine. Accordingly, the present disclosure further provides a vaccine composition comprising an antigen derived from a HIBP surface receptor protein from a Gram-negative pathogenic bacterial species, wherein the protein derived from the HIBP surface receptor protein has been modified in such a manner that it is unable to substantially bind host iron binding protein.

[0035] In further embodiments, the present disclosure further also includes a vaccine composition comprising a polypeptide comprising a C-lobe domain or an N-lobe domain of an HIBP surface receptor protein obtainable from a Gram-negative pathogenic bacterial species wherein the polypeptide is unable to substantially bind host iron binding protein.

[0036] In further embodiments, the vaccine composition comprises a polypeptide comprising a C-lobe domain or an N-lobe domain of an HIBP surface receptor polypeptide wherein the C-lobe domain or the N-lobe domain comprises a plurality of β-strands connected by a plurality of loop domains, and wherein at least one loop domain has been modified and wherein the polypeptide is unable to substantially bind host iron binding protein.

[0037] The present disclosure further provides methods for administering a vaccine to a vertebrate subject, the method comprising administering to the subject a vaccine comprising a polypeptide comprising a C-lobe domain or an N-lobe domain of an HIBP surface receptor protein obtainable from a Gram-negative pathogenic bacterial species, wherein the vaccine is administered in an amount sufficient to prevent or treat a disease caused by a Gram-negative bacterial species.

[0038] The present disclosure further includes a vaccine comprising a C-lobe domain or an N-lobe domain of an HIBP surface receptor for use in the prevention of infection or disease by infectious Gram-negative bacteria, including bacteria belonging to the genus Actinobacillus, Neisseria, Haemophilus, Mannheimia, Histophilus, Pasteurella or Moraxella.

[0039] In preferred embodiments, the C-lobe domain or the N-lobe domain comprises a plurality of β-strands connected by a plurality of loop domains, and at least one loop domain of the plurality of loop domains has been modified.

[0040] Other features and advantages of the present disclosure will become apparent from the following detailed description. It should be understood, however, that the detailed description, while indicating preferred embodiments of the disclosure, are given by way of illustration only, since various changes and modifications within the spirit and scope of the disclosure will become apparent to those of skill in the art from the detailed description.

### BRIEF DESCRIPTION OF THE DRAWINGS

[0041] The disclosure is in the hereinafter provided paragraphs described in relation to its Figures. The Figures provided herein are provided for illustration purposes and are not intended to limit the present disclosure.

### BRIEF DESCRIPTION OF THE DRAWINGS

[0042] FIG. 1 depicts an alignment of the polypeptide sequences of several TbpBs, notably ApH49 TbpB (SEQ.ID NO: 2), ApH87 TbpB (SEQ.ID NO: 10), and AsH57TbpB (SEQ.ID NO: 28), from porcine TbpB pathogens and structural models of the proteins (pdb 3HOL, 3PQS and 3PQU, respectively). These three proteins provide a good representation of the sequence diversity amongst TbpBs from porcine pathogens (FIG. 4, large black arrows). The upper panel illustrates the polypeptide sequence alignment, whereas the lower panel illustrates the structural models. In the sequence alignment the domain structure is demarked by background shading and labeled accordingly. The secondary structural elements are illustrated and nomenclature and numbering for the β-strands (“β1”-“β31”) and loops (L1-L32) are illustrated immediately above the aligned sequences. The sub-regions for loop 8 (8a; 8b; and 8c) in this figure are referred to due to the large size of loop 8, differences between TbpB variants and secondary structural elements in some loop variants. Further indicated are the C-lobe and N-lobe cap areas labeled as “C-lobe Cap Area” and “N-lobe Cap Area”, respectively and the C-lobe handle and N-lobe handle areas labeled as “C-lobe handle” and “N-lobe handle” areas, respectively. The structural models for the three TbpBs in the alignment in the upper panel are depicted in the bottom panel and the domains are labeled for the third structural model (AsH57TbpB), which is depicted in an identical orientation as the other two models.

[0043] FIG. 2 depicts a schematic drawing of certain secondary structural features of the amino acid sequence of a TbpB polypeptide with the recommended nomenclature for this class of proteins. The N and C-termini of the polypeptide are indicated and labeled “N” and “C” respectively. The β-strands are indicated by arrows and sequentially labeled starting from the N-terminus “β1” to “β31”. The loop domains are indicated and labeled “L1” to “L32”. The sequences of the loops of the TbpB polypeptide from A. pleuropneumoniae Strain H49 TbpB (SEQ.ID NO: 2) are included in this patent application (SEQ.ID NO: 41 to SEQ.ID NO: 106). Further indicated are the C-lobe and N-lobe cap areas labeled as C-lobe Cap Area and N-lobe Cap Area, respectively, and the C-lobe handle and N-lobe handle areas labeled as “C-lobe handle” and “N-lobe handle” areas.

[0044] FIG. 3A depicts a comparison of the magnitude of the antibody response against the intact TbpB protein from the human pathogen Neisseria meningitidis (strain B16B6—SEQ.ID NO: 117) or the intact TbpB from the porcine pathogen Actinobacillus pleuropneumoniae (strain H49—SEQ.ID NO: 2) in different host species (mice, rabbits or pigs) using 33% Emulsigen D as adjuvant. The antibody titre against the TbpB from Actinobacillus pleuropneumoniae (grey bar) is slightly higher in mice and rabbits than against the TbpB from Neisseria meningitidis (black bar), but substantially lower in pigs. These results infer that binding of host transferrin may be influencing the development of the antibody response.

[0045] FIG. 3B depicts a comparison of the magnitude of the antibody response in pigs against intact TbpB from the bovine pathogen Mannhemia haemolytica (strain H196—SEQ.ID NO: 206) or the intact TbpB (SEQ.ID NO:2), TbpB N-lobe (SEQ.ID NO: 8) or TbpB C-lobe (SEQ.ID NO: 6) from the porcine pathogen Actinobacillus pleuropneumoniae (strain H49). The clusters of bars represent serum samples taken from individual pigs immunized on day 0 (prior to the first immunization), day 21 (after the first immunization), day 42 (after the second immunization) and day 56 (after the third immunization). The sera from the pig immunized with intact TbpB from M. haemolytica (Mh Intact; strain H196—SEQ.ID NO: 206), were tested with the intact M. haemolytica TbpB bound to the ELISA plate. The sera from the pigs immunized with the A. pleuropneumoniae TbpB (Ap Intact), TbpB N-lobe (Ap N Lobe) or the TbpB C-lobe (Ap C Lobe) were analyzed with the intact A. pleuropneumoniae TbpB bound to the ELISA plate.

[0046] FIG. 3C depicts a comparison of cross-reactivity of antisera against the C-lobe polypeptide domain of TbpB (SEQ.ID NO: 6), N-lobe polypeptide domain of TbpB (SEQ.ID NO: 8) and intact TbpB (SEQ.ID NO: 2) from the porcine pathogen Actinobacillus pleuropneumoniae (strain H49). The cluster of bars represent the reactivity of sera against intact TbpB from three different porcine pathogens; Actinobacillus pleuropneumoniae strain H49 (SEQ.ID NO: 2, black bar), Haemophilus parasuis strain HP5 (SEQ.ID NO: 115, dark grey bar) and Actinobacillus pleuropneumoniae strain H87 (SEQ.ID NO: 12, light grey bar) that were selected to represent antigenically diverse TbpBs (FIG. 4). The results illustrate the reactivity of sera immunized with intact TbpB (first cluster from the left, labeled “Intact”), TbpB N-lobe (second cluster from the left, labeled “N lobe”), TbpB C-lobe (third cluster from the left, labeled “C lobe”) or a mixture of the N-lobe and the C-lobe (fourth cluster from the left labeled “N+C lobe”). Standard error of the mean (SEM) error bars are shown. The statistics were done via ANOVA with Tukeys HSD (honest significant difference) test done as post hoc. The stars shown on the figure denote specific immunization/protein pairs that differ significantly from the C lobe or N+C lobe tested against H49.

[0047] FIG. 4 depicts the sequence diversity of TbpBs from the porcine pathogens Actinobacillus pleuropneumoniae, A. suis and Haemophilus parasuis isolated from pigs in North America, Europe and Asia. The maximum likelihood phylogenetic tree illustrates the relationship between 56 TbpBs based on sequences from our collection of clinical isolates or obtained from public databases. The TbpB sequences cluster into 3 main groups with representative isolates indicated by the arrows (SEQ.ID NO: 2; SEQ.ID NO: 12; SEQ.ID NO: 28 and SEQ.ID NO: 107 to SEQ.ID NO: 115). The strains that express the TbpB variants used in the ELISA assay illustrated in FIG. 3 are indicated by the large black stars; A. pleuropneumoniae strain H87 (SEQ.ID NO: 12), A. pleuropneumoniae strain H49 (SEQ.ID NO: 2) and H. parasuis strain HP5 (SEQ.ID NO: 115). The large black arrows depict the three TbpBs used in the alignment illustrated in FIG. 1; A. pleuropneumoniae strain H87 (SEQ.ID NO: 12), A. pleuropneumoniae strain H49 (SEQ.ID NO: 2) and A. suis strain H57 (SEQ.ID NO: 28).

[0048] FIG. 5 depicts the nonrandom binding of the TbpB N-lobe (SEQ.ID NO: 8) from A. pleuropneumoniae H49 to ELISA plates illustrated by the substantial reduction in binding of labeled transferrin when the purified TbpB protein is used to coat the ELISA plate rather than the fusion protein (i.e. maltose binding protein (Mbp) fused to the TbpB N-lobe) precursor (left portion of Panel A and Panel B). The figure also illustrates how the use of an N-terminal biotinylated peptide overcomes the random binding (right portion of Panel A and Panel B). The left portion of Panel A illustrates the results of an assay using labeled transferrin (Tf) to measure bound purified Mbp-TbpB N-lobe or TbpB N-lobe to regular ELISA plates. The right portion illustrates the results when the recombinant proteins contain a biotinylated N-terminal peptide tag that is used to attach to streptavidin-coated ELISA plates. Panel B is a cartoon illustrating what is believed to occur in the different ELISA wells for the corresponding results shown immediately above in Panel A.

[0049] FIG. 6 depicts the design and production of a multimer comprised of the TbpB C-lobe from three different porcine pathogens. Panel A shows the DNA and protein sequence for the trimer (SEQ.ID NO: 39; SEQ.ID NO: 40) of C-lobes from A. pleuropneumoniae strain H49 (SEQ.ID NO: 6), A. suis strain H57 (SEQ.ID NO: 35) and A. pleuropneumoniae strain H87 (SEQ.ID NO: 22), in that order. The underline indicates the peptide sequence connecting the individual C-lobes or preceding the first C-lobe. Panel B illustrates SDS-PAGE analysis of a preparation of the C-lobe trimer compared to preparations of the N-lobe and C-lobe from N. meningitidis strain M982. 1 μl of sample was applied to lanes 1, 4 & 7, 5 μls to lanes 2, 5 & 8 and 10 μls to lanes 3, 6 & 9. Protein molecular weight standards (MWS) observed on these gels are 93, 70, 63, 41, 30 and 22.

[0050] FIG. 7 depicts the immune response against the TbpB C-lobe from A. pleuropneumoniae (H49 C-lobe, SEQ.ID NO: 6) compared the immune response against a trimer comprised of C-lobes from TbpB C-lobes from A. pleuropneumoniae H49, A. suis H57 and A. pleuropneumoniae H87 (C-lobe trimer, SEQ.ID NO: 40). The cluster of bars on the left side of the figure represent the immune response against H49 C-lobe whereas the cluster of bars on the left side of the figure represents the immune response against the C-lobe trimer. The black bar represents the immune response against the TbpB from A. pleuropneumoniae strain H49 (SEQ.ID NO: 2), the dark grey bar represents the immune response against the TbpB from H. parasuis strain HP5 (SEQ.ID NO: 115) and the light grey bar represents the immune response against the TbpB from A. pleuropneumoniae strain H87 (SEQ.ID NO: 22).

[0051] FIG. 8 depicts the loop regions of the Actinobacillus pleuropneumoniae strain H49 TbpB N-lobe (labeled “loop 1”; “loop 5”; “loop 8a”; “loop 8c” and “loop 12”) (SEQ ID. NO: 41; SEQ.ID NO: 49; SEQ.ID NO: 55; and SEQ.ID NO: 63, respectively) targeted for loop reduction and the sequences of the original and modified loops. Loop 8a and loop 8c refer to portions of loop 8 present in the TbpB from strain H49. Panel A is a structural model of the Actinobacillus pleuropneumoniae TbpB N-lobe viewed from the side (relative to the predicted dominant orientation at the cell surface) with the targeted regions labeled. Panel B is the same structural model viewed from the top to illustrate the association of loops 1 and 5 with the handle domain and loops 8a, 8c and 12 associated with the barrel domain. Panel C is an alignment of the native TbpB and the TbpB with reductions in the targeted loop regions. The regions of the sequence encoding the loops are highlighted in grey and labeled with the loop numbers.

[0052] FIG. 9 illustrates that the engineered loop reduction of the TbpB N-lobes from A. pleuropneumoniae strain H49 (SEQ.ID NO: 10), A. suis strain H57 (SEQ.ID NO: 38) and A. pleuropneumoniae strain H87 (SEQ.ID NO: 26) did not adversely affect their production or stability but eliminated binding by porcine Tf. The upper panel illustrates the production of intact H49 TbpB (SEQ.ID NO: 2), native h49 TbpB N-lobe (SEQ.ID NO: 8) and the engineered TbpB N-lobes from A. pleuropneumoniae strain H49 (SEQ.ID NO: 10), A. suis strain H57 (SEQ.ID NO: 38) or A. pleuropneumoniae strain H87 (SEQ.ID NO:26). They were expressed as fusion proteins with an N-terminal maltose binding protein with a polyhistidine tag and captured on a Ni-NTA resin. The bound proteins were released in SDS-PAGE buffer and analyzed on a 10% SDS-PAGE gel. The middle panel represents the same preparations captured with an affinity resin consisting of porcine transferrin coupled to Sepharose (pTf-Sepharose) and eluted in SDS-PAGE buffer. The bottom panel illustrates a dot assay with the material from the upper panel eluted from the Ni-NTA resin and spotted onto a nitrocellulose resin, blocked and exposed to horse-radish peroxidase conjugated porcine transferrin (HRP-pTf) in blocking solution, and the bound HRP detected with incubation in HRP substrate.

[0053] FIG. 10 depicts the sequence diversity of TbpBs from the human pathogen Neisseria meningitidis. A subset of tbpB genes sequenced from a collection of over 100 strains combined with a large collection of sequences available in the BIGSDB public database (http://pubmlst.org/software/database/bigsdb/—Bacterial Isolate Genome Sequence Database) are represented in this figure. The collection of sequences represents a global collection of isolates over an extended time period of nearly 50 years, and thus this is a fairly comprehensive representation of the overall TbpB diversity. FIG. 10A illustrates the sequence diversity of the intact TbpBs. The sequences for TbpBs from strains indicated by arrows, double arrows, or lines are appended (SEQ.ID NO: 117; SEQ.ID NO: 124; SEQ.ID NO: 132 to SEQ.ID NO: 147; SEQ.ID NO: 177; and SEQ.ID NO: 178) to provide representative sequences for the identified groups. Two primary clades represented by Group 1 and by Groups 2-4 are identified within this tree corresponding to isotype I and isotype II TbpB lineages (22). Support values for primary branches are depicted, and a “*” identifies branches with 100% support. Antigens derived from the TbpB from strain B16B6 (SEQ.ID NO: 117, black arrow) were used to generate the antisera analyzed in FIG. 11 and were screened for reactivity against TbpBs from the strains illustrated by the grey arrows (SEQ.ID NOs: 123; and SEQ.ID NO: 132 to SEQ.ID NO: 139) using our custom ELISA assay (FIG. 5). FIG. 10B depicts the sequence diversity of TbpBs C-lobes that were derived from the TbpB sequences. The sequences for TbpB C-lobes from strains indicated by arrows or lines are appended (SEQ.ID NO: 119; SEQ.ID NO: 125; and SEQ.ID NO: 179 to SEQ.ID NO: 195) to provide representative sequences. The two strains indicated by the double-headed arrows were included to provide a more comprehensive representation of the C-lobe diversity but were not available for the analysis of antisera illustrated in FIG. 11.

[0054] FIG. 11 depicts the reactivity of antisera directed against truncated intact TbpB (SEQ.ID NO: 148, aa 43-575) and TbpB C-lobe (SEQ.ID NO: 119 aa 342-575) derived from B16B6, a representative isotype I strain of N. meningitidis. The antisera were tested in our custom ELISA assay (FIG. 5) against a panel of TbpBs that represent the overall sequence diversity of TbpBs in N. meningitidis (arrows, FIG. 10). The panel of TbpBs are from N. meningitidis strains B16B6 (SEQ.ID NO: 117), H44/76 (SEQ.ID NO: 133), S3131 (SEQ.ID NO: 132), M990 (SEQ.ID NO: 134), M978 (SEQ.ID NO: 135), M992 (SEQ.ID NO: 138), P3006 (SEQ.ID NO: 139), 120M (SEQ.ID NO: 137), MC58 (SEQ.ID NO: 136) and M982 (SEQ.ID NO: 123). The results demonstrate that the C-lobe antiserum had higher titres than the TbpB antiserum against all of the TbpBs except the TbpBs from B16B6 and H44/76.

[0055] FIG. 12 depicts the design and production of a dimer comprised of the TbpB C-lobe from two different strains of the human pathogen Neisseria meningitidis (SEQ.ID NO: 118). Panel A shows the DNA and protein sequence for the dimer of C-lobes from N. meningitidis strains B16B6 (SEQ.ID NO: 118; and SEQ.ID NO: 119) and M982 (SEQ.ID NOS: 124; and SEQ.ID NO: 125), in that order. The underline indicates the DNA sequence of the peptide region connecting the individual C-lobes. Panel B illustrates SDS-PAGE analysis of a preparation of the C-lobe dimer compared to preparations of the individual C-lobes from N. meningitidis strains M982 and B16B6.

[0056] FIG. 13 depicts the analysis of the immune response against a dimer comprised of the TbpB C-lobe from two different strains of the human pathogen Neisseria meningitidis (SEQ.ID NO: 150). The pairs of bars represent sera obtained from rabbits immunized with adjuvant alone (naive), with B16B6 C-lobe (SEQ.ID NO: 119), with M982 C-lobe (SEQ.ID NO: 125) or the dimer of B16B6 and M982 C-lobes (SEQ.ID NO: 150) illustrated in FIG. 12. The white bars represent results of the novel, custom ELISA assay with immobilized intact M982 TbpB (SEQ.ID NO: 123) and the black bar represents the results with immobilized intact B16B6 protein (SEQ.ID NO: 117).

[0057] FIG. 14 depicts the reduction of loop domains of the C-lobe of the TbpB polypeptide of N. meningitidis M982. In Panel A, structural models of the native C-lobe (SEQ.ID NO: 125) and modified C-lobe (SEQ.ID NO: 129) are shown to illustrate the reduction of the four loops (L18, L21, L23 and L27). In the model on the left hand side (SEQ.ID NO: 125) the loops targeted for reduction are indicated with a dotted black line. The middle model (SEQ.ID NO: 129) illustrates the modified loop domains. In the model on the right hand side, the two prior structures are superimposed to show how the large variable loops have been removed without effecting overall protein structure. Panel B is a polypeptide sequence alignment comparing sequences of the native C-lobe, the engineered G-lobes with those from which a single loop has been modified and the C-lobe in which all four loops (L18, L21, L23 and L27); have been modified (the sequence labeled “loopless”). The regions of the sequence encompassing the targeted loops are highlighted in grey and the loop number is indicated in grey font.

[0058] FIG. 15 depicts the microbial production of the modified C-lobes of N. meningitidis M982 described in FIG. 14. The wild-type (WT) C-lobe (SEQ.ID NO: 125) corresponds to the model on the left hand side in Panel A of FIG. 14. The other samples represent proteins with truncations in the loops L18, L21, L23, and L27 and the protein with all four loops removed (all loops). The structural model for this protein (SEQ.ID NO: 129) is illustrated in the middle of Panel A in FIG. 14. Protein molecular weight standards (MWS) observed on this gel are 93, 70 and 41 kDa.

[0059] FIG. 16 depicts the immunogenicity of the modified C-lobe of N. meningitidis strain M982 relative to the native C-lobes from strain M982 and B16B6. The endpoint titres of mouse antisera were determined with our custom ELISA assay. Mice were either immunized with the C-lobe from strain M982 (SEQ.ID NO: 125, first bar), the C-lobe TbpB from strain B16B6 (SEQ.ID NO: 119, second bar) or the ‘loopless’ M982 C-lobe (SEQ.ID NO: 129, last two bars). The sera were tested against immobilized intact TbpB from strain M982 (SEQ.ID NO: 123) (first and third bars) or strain B16B6 (SEQ.ID NO: 117) (second and fourth bars). The results show that the modified C-lobe was more immunogenic as it resulted in a higher titre against intact TbpB from strain M982 than the parent C-lobe protein (compare bars 3 and 1). Surprisingly the modified C-lobe even produced a similar level of reactivity to the heterologous B16B6 TbpB as the C-lobe from that strain (compare bars 4 and 2).

[0060] FIG. 17 depicts the design of hybrid proteins displaying regions of TbpA on the TbpB C-lobe scaffold. Panel A is a structural model of TbpA (SEQ.ID NO: 152) highlighting the regions selected to ‘transplant’ onto the TbpB C-lobe. The TbpA loop 3 helix, loop 10, loop 11 and plug loop are shown as space-filled regions. Panel B shows an alignment of the native C-lobe (C-lobe) (SEQ.ID NO: 125), the loopless C-lobe scaffold (loopless C) (SEQ.ID NO: 129) and a hybrid protein with the all the regions of TbpA displayed (SEQ.ID NO: 131). In the hybrid protein the TbpA loop 3 helix replaces loop 18 of the TbpB C-lobe, TbpA loop 10 replaces loop 21 of the TbpB C-lobe, TbpA loop 11 replaces loop 23 of the TbpB C-lobe, and the TbpA plug loop replaces loop 27 of the TbpB C-lobe.

[0061] FIG. 18 depicts the microbial production of hybrid TbpA-TbpB C-lobes that were produced using the strategy described in FIG. 17. Panel A illustrates the production of the recombinant fusion proteins with an N-terminal maltose binding protein (Mbp) fusion partner and Panel B illustrates the proteins after cleavage with TEV protease. The wild-type (WT) protein is the native M982 C-lobe (SEQ.ID NO: 125) and the Minus Loops is the C-lobe with all four loops removed (SEQ.ID NO: 129) that effectively serves as the scaffold for displaying the TbpA regions. Loop 10 refers to the protein with the extracellular loop region of TbpA inserted into the TbpB C-lobe loop 21 (SEQ.ID NO: 154). Loop 11 refers to the protein with the extracellular loop region of TbpA that was inserted into the TbpB C-lobe loop 23 (SEQ.ID NO: 156). Helix 3 refers to the segment of extracellular loop 3 of TbpA that was inserted into the TbpB C-lobe loop 27 (SEQ.ID NO: 158). Plug loop refers to the region from the plug domain of TbpA that was inserted into the TbpB C-lobe loop 18 (SEQ.ID NO: 160). Protein molecular weight standards (MWS) observed on these gels are 93, 70, 53, 41 and 22.

[0062] FIG. 19 depicts the immunogenicity of the modified C-lobe of N. meningitidis strain M982 compared to the modified C-lobe with foreign loop regions from TbpA spliced into the modified loop sites. The endpoint titres of mouse antisera were determined with our custom ELISA assay. Mice were either immunized with; (i) the ‘loopless’ C-lobe with all four loops removed (SEQ.ID NO: 129), (ii) the ‘loopless’ C-lobe with TbpA loop 10 inserted into the TbpB C-lobe loop 21 (SEQ.ID NO: 154), (iii) the ‘loopless’ C-lobe with TbpA loop 11 inserted into the TbpB C-lobe loop 23 (SEQ.ID NO: 156), (iv) the ‘loopless’ C-lobe with TbpA loop 3 helix inserted into the TbpB C-lobe loop 27 (SEQ.ID NO: 158), or (v) the ‘loopless’ C-lobe with TbpA plug loop inserted into the TbpB C-lobe loop 18 (SEQ.ID NO: 160). The sera were tested against the hybrid TbpA-TbpB antigen in which the ‘loopless’ C-lobe has all four of the TbpA loops inserted (SEQ.ID NO: 131). The results show that all the hybrid antigens were immunogenic, at least as immunogenic as the loopless' C-lobe.

[0063] FIG. 20 depicts the design and production of hybrid proteins displaying regions of LbpA [SEQ.ID NO: 162] on the TbpB C-lobe scaffold. Panel A is a structural model of LbpA highlighting the regions selected to ‘transplant’ onto the TbpB C-lobe. The LbpA loop 3 helix is colored darker grey and loop 2 is colored black. Panel B shows an alignment of the native C-lobe (C-lobe, SEQ.ID NO: 125), the loopless C-lobe scaffold (loopless C, SEQ.ID NO: 129) and the hybrid protein with the regions of LbpA displayed. In the hybrid protein the LbpA loop 2 replaces loop 21 of the TbpB C-lobe (SEQ.ID NO: 164) the LbpA loop 3 helix replaces loop 18 of the TbpB C-lobe (SEQ.ID NO: 166) and. Protein molecular weight standards (MWS) observed on these gels are 100, 75, 63, and 48.

[0064] FIG. 21 depicts the design of a ‘conjugation loop’ in the TbpB C-lobe from the human pathogen Haemophilus influenzae. Panel A shows the DNA and protein sequence for the gene encoding the hybrid gene with the DNA region encoding the conjugation loop shown in larger font (SEQ.ID NO: 167). The amino acids are shown in single letter code in which lysine is indicated by the letter K, of which there are 42 in the conjugation loop compared to 24 in the entire C-lobe (SEQ.ID NO: 168). Panel B illustrates a structural model of the H. influenzae TbpB C-lobe indicating the position for insertion of the conjugation loop. As illustrated, the conjugation loop is inserted into the handle domain of the C-lobe replacing loop L23 of the C-lobe (using the loop nomenclature used throughout this disclosure) (FIG. 2). It is noted that for illustrative purposes the model was created with a conjugation loop of 11 amino acids instead of the 91 in the actual protein.

[0065] FIG. 22 depicts the transferrin binding properties of site-directed mutant TbpB proteins derived from recombinant truncated TbpB proteins from A. pleuropneumoniae, A. suis and H. parasuis. The recombinant truncated TbpB proteins were expressed as fusion proteins and tested for binding activity. Recombinant fusion proteins were initially screened for transferrin binding by a solid-phase binding assay and an affinity capture assay. The purified mutant proteins were then evaluated for binding to pTf either by isothermal calorimetry, surface plasmon resonance or biolayer interferometry (23-25). Several of the mutations resulted in a 100 fold increase in the affinity constant (Kd), such as the F171A mutation in the TbpB from A. pleuropneumoniae strain H49, the Y174A mutation in the TbpB from A. pleuropneumoniae strain H49 or the Y167A or W176A mutations in the TbpB from H. parasuis strain HP5. It is interesting to note that these mutants all map to loop 8.

[0066] FIG. 23 depicts the enhanced ability of a site-directed mutant protein to induce a protective immune response in the native host. In this figure the ability of the site-directed Y167A TbpB from H. parasuis strain HP5 (SEQ.ID NO: 174) is compared to the wild-type TbpB (SEQ.ID NO: 115), and controls including a commercial vaccine (Porcillis Glasser) and adjuvant alone. The pigs were challenged by intratracheal inoculation with 10⁸ colony-forming units (cfus) of the Hp5 (Nagasaki) strain and were monitored for clinical signs and symptoms throughout the duration of the experiment. Animals with severe symptomotology were euthanized prior to the end of the experiment. The graph shows the survival curve from 24 to 108 hrs at 12 hr increments, and then connects to the final time point at 14 days.

[0067] FIG. 24 depicts the cellular immune response induced by the native and mutant TbpB antigens. Panel A and Panel B illustrate the B-cell response on the day of challenge (after two IM immunizations) and 4 days (96 hrs) after challenge, respectively. Panel C and Panel D illustrate the T-helper cell response on the day of challenge and 4 days after challenge. The diamonds, triangles and squares represent pigs immunized with native TbpB, the Y167A mutant TbpB and the Porcilis Glasser (PG) vaccine, respectively. There are reduced numbers of samples for the native TbpB and PG vaccine treated pigs on the 4th day after challenge. The analysis was performed by FACS analysis with peripheral blood mononuclear cells. Significant differences between groups: *p<0.05, *** p<0.001.

[0068] FIG. 25 depicts that immunization with recombinant truncated TbpB, recombinant truncated TbpB N-lobe or recombinant TbpB C-lobe from N. meningitidis provides protection from colonization in a humanized transgenic mouse model. In the experiment illustrated in Panel A, transgenic C57 black mice expressing the human CEACAM1 receptor were immunized with recombinant truncated TbpB from N. meningitidis strain M982 or with adjuvant alone on day 1 and day 21. Mice were subjected to intranasal inoculation with approximately 1×10⁷ CFU of N. meningitidis strain M982 on day 35. The squares and circles represent the CFU recovered from individual mice 3 days after challenge (day 38). Panel B illustrates a follow up experiment in which mice were immunized either with recombinant truncated TbpB, recombinant truncated TbpB N-lobe, recombinant TbpB C-lobe, recombinant factor H binding protein or adjuvant alone on day 1 and day 21. As in Panel A, the number of CFUs of N. meningitidis strain M982 recovered 3 days after challenge in individual mice are plotted on the graph.

[0069] FIG. 26 depicts the sequence diversity of TbpBs and TbpB G-lobes from the human pathogen Neisseria gonorrhoeae. Panel A (FIG. 26A) illustrates the sequence diversity of the intact TbpBs and Panel A (FIG. 26B) represents the sequence diversity for the TbpB C-lobes. Sequences for representative N. meningitidis TbpBs and TbpB C-lobes (FIG. 10, arrows and double arrows) were included in this analysis to determine to what extent the sequences for TbpBs and TbpB C-lobes from N. gonorrhoeae is a subset of the sequence diversity of that present in N. meningitidis. As for FIG. 10, representative N. gonorrhoeae TbpB sequences (SEQ ID NO: 207 to SEQ ID NO: 212) and TbpB C-lobe sequences (SEQ ID NO: 213 to SEQ ID NO: 218) indicated by arrows are included in appendix to provide a representation of the overall sequence diversity. As illustrated in Panel A there are two clusters of N. gonorrhoeae TbpBs that are sub-branches of meningococcal isotype 2 TbpBs. There is one larger cluster most closely related to TbpB from meningococcal strain H44/76 and a smaller cluster most closely related to TbpB from strain P3306. The C-lobe tree in Panel B reveals that the N. gonorrhoeae TbpB C-lobes form a distinct cluster from the meningococcal TbpB C-lobes that are most closely related to the meningococcal isotype 2 TbpBs.

[0070] FIG. 27 depicts the sequence diversity of TbpBs and TbpB C-lobes from the human pathogen Haemophilus influenzae. Panel A (FIG. 27A) illustrates the sequence diversity of the intact TbpBs and Panel B (FIG. 26B) represents the sequence diversity for the TbpB C-lobes. Representative H. influenzae TbpB sequences (SEQ ID NO: 196-204) indicated by arrows are included in the appendix to provide a representation of the overall sequence diversity. As illustrated in Panel A there are three main clusters (groups) of H. influenzae TbpBs that include type b and non-typeable H. influenzae strains intermixed, indicating that the TbpB diversity is not linked to any other attribute such as presence of capsule. There are also three main groups of C-lobe diversity.

[0071] FIG. 28 depicts the sequence diversity of TbpBs amongst the ruminant pathogens Mannheimia haemolytica, Mannheimia glucosida and Bibersteinia trehalosi (also known to the art as Pasteurella haemolytica and P. trehalosi, respectively). Arrows indicate representative sequences included in the SEQ.ID NO: listing.

[0072] FIG. 29 depicts the sequence diversity of TbpBs from Moraxella catarrhalis. Arrows indicate the representative sequences of TbpBs from the three main clusters that are included in the SEQ.ID NO: listing.

[0073] FIG. 30 depicts an illustrative phylogenetic tree.

[0074] TABLES 1-3 represent combinations of 1, 2 or 3 loop domains, respectively, selected from the loop domains L1-L32 of HIBP polypeptides, which may be modified in accordance with the present disclosure.

[symbol]

signifies a loop domain or combination of loop domains that may be modified in accordance with certain embodiments of the current disclosure. [symbol]
signifies a non-permitted combination of loop domains in accordance with certain embodiments of the current disclosure.
□ signifies a combination of permitted loop domains, displayed however by a [symbol] elsewhere in the same table, in accordance with certain embodiments of the current disclosure.

### DETAILED DESCRIPTION OF THE DISCLOSURE

[0075] Various compositions and methods will be described below to provide an example of an embodiment of each claimed subject matter. No embodiment described below limits any claimed subject matter and any claimed subject matter may cover methods, processes, compositions or systems that differ from those described below. The claimed subject matter is not limited to compositions or methods having all of the features of any one composition, method, system or process described below or to features common to multiple or all of the compositions, systems or methods described below. It is possible that a composition, system, method or process described below is not an embodiment of any claimed subject matter. Any subject matter disclosed in a composition, system, method or process described below that is not claimed in this document may be the subject matter of another protective instrument, for example, a continuing patent application, and the applicants, inventors or owners do not intend to abandon, disclaim or dedicate to the public any such subject matter by its disclosure in this document.

[0076] It should be noted that terms of degree such as “substantially”, “essentially” “about” and “approximately” as used herein mean a reasonable amount of deviation of the modified term such that the end result is not significantly changed. These terms of degree should be construed as including a deviation of the modified term if this deviation would not negate the meaning of the term it modifies.

[0077] As used herein, the wording “and/or” is intended to represent an inclusive-or. That is, “X and/or Y” is intended to mean X or Y or both, for example. As a further example, “X, Y, and/or Z” is intended to mean X or Y or Z or any combination thereof.

[0078] All publications, patents and patent applications are herein incorporated by reference in their entirety to the same extent as if each individual publication.

[0079] As hereinbefore mentioned, the present disclosure provides novel immunogenic compositions, and in particular immunogenic compositions based on the HIBP surface receptor proteins from Gram-negative pathogenic bacterial species, such as Neisseria meningitidis. The immunogenic compositions of the present disclosure are useful in that they may be employed to prepare novel vaccine formulations to protect humans and animals against infective pathogenic Gram-negative bacterial species. In accordance with the present disclosure, the HIBP surface receptor proteins of the present disclosure are modified in such a manner that they are unable to substantially bind host iron binding proteins. Such modified HIBP surface receptor proteins exhibit unexpectedly strong immunogenic properties. Furthermore the immunogenic compositions of the present disclosure are substantially stable polypeptides and therefore may readily be manufactured. Moreover, and importantly, the immunogenic compositions of the present disclosure are unexpectedly effective, for example by inducing a cross-reactive immune response, thus permitting protection against multiple pathogenic microbial organisms by the administration of a single efficacious vaccinating compound. The vaccines prepared in accordance with the present disclosure do not contain live organisms or crude extracts, thereby representing a very limited health risk.

[0080] Accordingly, the present disclosure provides, in at least one embodiment, an immunogenic composition comprising an HIBP surface receptor protein from a Gram-negative pathogenic bacterial species, wherein the HIBP surface receptor protein has been modified in such a manner that it is unable to substantially bind host iron binding protein.

[0081] The present disclosure further provides an immunogenic composition comprising a polypeptide comprising a C-lobe domain or an N-lobe domain of an HIBP surface receptor protein obtainable from a Gram-negative pathogenic bacterial species, wherein the polypeptide is unable to substantially bind host iron binding protein. In certain embodiments, the N-lobe domain or the C-lobe domain of the HIBP surface receptor protein comprises a plurality of β-strands connected by a plurality of loop domains, and one of more loop domains of the plurality of loop domains has been modified.

### TERMS AND DEFINITIONS

[0082] Unless defined otherwise, all technical and scientific terms used herein have the same meaning as commonly understood by one of ordinary skill in the art to which the disclosure pertains. All patents and patent applications, and other publications, including nucleic acid and polypeptide sequences from GenBank, SwissPro and other databases, cited herein, whether supra or infra, are hereby incorporated by reference in their entirety, where permitted. It is further noted that, as used in this specification and the appended claims, the singular forms “a”, “an”, and “the” include plural referents unless the content clearly dictates otherwise. Thus, for example, reference to “an immunogen” includes a mixture of two or more such agents, reference to “a polypeptide” includes reference to mixtures of two or more polypeptides, reference to “a cell” includes two or more such cells, and the like.

[0083] The terms “immunogen” and “immunogenic composition”, as interchangeably used herein, are used in their broadest sense to refer to a molecule which contains one or more epitopes that will stimulate the immune response in a host organism to generate a cellular immunogen-specific immune response, and/or a humoral antibody response. Immunogens include nucleic acids, proteins, polypeptides, peptides and immunogenic protein fragments.

[0084] The terms “vaccine” and “vaccine composition”, as interchangeably used herein, refer to any pharmaceutical composition containing an immunogen, which composition can be used to prevent or treat a disease or condition in a subject. The terms thus encompass subunit vaccines, i.e., vaccine compositions containing immunogens which are separate and discrete from a whole organism with which the immunogen is associated in nature.

[0085] The term “vertebrate subject” refers to any member of the subphylum cordata, particularly mammals, including, without limitation, humans and other primates. The term does not denote a particular age. Thus both newborn, infant, child and adult individuals are intended to be covered.

[0086] The interchangeably herein used terms “HIBP surface receptor protein”, “HIBP surface receptor polypeptide”, “host iron binding protein surface receptor protein” or “host iron binding protein surface polypeptide” refer to any membrane anchored protein or polypeptide obtainable from a Gram-negative bacterial species capable of interacting with host iron-binding proteins. The term includes, any TbpB and LbpB proteins. HIBP surface receptor proteins when folded in their native three-dimensional structure, are comprised of a bi-lobal structure comprising an N-lobe domain and a C-lobe domain, the N-lobe domain and the C-lobe domain each comprising a plurality of β-strands assembled in a β-barrel, and a plurality of β-strands assembled in a β-sheet structure adjacent to the β-barrel, referred to as the handle domain, wherein the β-strands are connected by a plurality of loop domains (as further illustrated in FIG. 1). The terms further refer to any and all HIBP surface receptor polypeptide sequences including all bacterial HIBP surface receptor polypeptides, including, without limitation, those set forth in SEQ.ID NO: 2; SEQ.ID NO: 12; SEQ.ID NO: 28; SEQ.ID NO: 107 to SEQ.ID NO: 115; SEQ ID NO: 117; SEQ.ID NO: 123; SEQ.ID NO: 131 to SEQ.ID NO: 147; SEQ.ID NO: 177; SEQ.ID NO: 178; SEQ.ID NO: 196 to SEQ.ID NO: 204; SEQ.ID NO: 206 to SEQ.ID NO: 212; and SEQ.ID NO: 219 to SEQ.ID NO: 228, and those comprising a sequence of amino acid residues which (i) are substantially identical to the amino acid sequences constituting any HIBP surface receptor protein set forth herein; (ii) are encoded by a nucleic acid sequence capable of hybridizing under at least moderately stringent conditions to any nucleic acid sequence encoding any HIBP surface receptor protein set forth herein or capable of hybridizing under at least moderately stringent conditions to any nucleic acid sequence encoding any HIBP surface receptor protein set forth herein, but for the use of synonymous codons. The terms further include any HIBP surface receptor protein precursor polypeptide; or (iii) will use transferrin binding proteins, lactoferrin binding proteins or their subdomains as templates when submitted to a structural modeling server such as Phyre2 (http://www.sbg.bio.ic.ac.uk/phyre2/) or Swiss-Model (http://swissmodel.expasy.org/), in the latter selecting automated mode. The terms further include mature TbpB polypeptides as well as any HIBP surface receptor polypeptide precursor, including any pre-HIBP surface receptor polypeptide precursor, or HIBP surface receptor polypeptide precursor comprising an N-terminal or other signal sequence.

[0087] The interchangeably herein used terms “integral outer membrane protein” and “IOM protein” refer to any integral outer membrane protein from Gram-negative bacterial species, including any proteins belonging to the TonB dependent subclass of proteins, which when folded in their native 3 dimensional structure comprise a 22-stranded C-terminal beta-barrel domain and N-terminal plug or cork domain capable of filling a channel in the C-terminal beta-barrel domain. The term includes without limitation and TbpA and LbpA protein. The terms further refer to any and all IOM polypeptide sequences including all including those set forth in SEQ.ID NO: 152; and SEQ.ID NO: 162 and those comprising a sequence of amino acid residues which (i) are substantially identical to the amino acid sequences constituting any IOM protein set forth herein; (ii) are encoded by a nucleic acid sequence capable of hybridizing under at least moderately stringent conditions to any nucleic acid sequence encoding any IOM protein set forth herein or capable of hybridizing under at least moderately stringent conditions to any nucleic acid sequence encoding any IOM protein set forth herein, but for the use of synonymous codons. The terms further include any IOM protein precursor polypeptide; or (iii) will use 3V8X or their subdomains as templates when submitted to a structural modeling server such as Phyre2 (http://www.sbg.bio.ic.ac.uk/phyre2/) or Swiss-Model (http://swissmodel.expasy.org/), in the latter selecting automated mode.

[0088] The term “N-lobe domain” as used herein refers to the N-terminal portion of a HIBP surface receptor protein comprising a plurality of β-strands connected by a plurality of loop domains, wherein some of the β-strands are configured to form a β-barrel and an adjacent β-sheet structure, termed a handle domain (see: FIG. 1; amino acid residue 46 to amino acid residue 342). The term N-lobe domain further includes, without limitation all polypeptides having the sequence set forth in SEQ.ID NO: 8; SEQ.ID NO: 10; SEQ.ID NO: 24; SEQ.ID NO: 26; SEQ.ID NO: 36; SEQ.ID NO: 38; SEQ.ID NO: 121; SEQ.ID NO: 127; SEQ.ID NO: 229; SEQ.ID NO: 231; and SEQ.ID NO: 233.

[0089] The term “C-lobe domain” as used herein refers to the C-terminal portion of a HIBP surface receptor protein comprising a plurality of β-strands connected by a plurality of loop domains, wherein some of the β-strands are configured to form a β-barrel and an adjacent β-sheet structure termed a handle domain. Referring further to FIG. 1 and FIG. 2, the C-lobe handle domain is the contiguous polypeptide domain from β-strand 16 onwards and up to and including β-strand 23 which, in the case of the in FIG. 2 depicted ApH49, ApH57 and ApH87 TbpB polypeptides, consists of amino acid residues 344 to 431, and in SEQ.ID. NO: 2 from amino acid residue 314 to amino acid residue 401 (ApH 49), in SEQ.ID. NO: 27 from amino acid residue 363 to amino acid residue 450 (ApH 57), and in SEQ.ID. NO: 12 from amino acid residue 315 to amino acid residue 401 (ApH 87). The C-lobe β-barrel domain is the contiguous polypeptide domain from β-strand 23 onwards through to the C-terminus of the polypeptide, which, in the case of the in FIG. 2 depicted ApH49, ApH57 and ApH87 TbpB polypeptides, is the polypeptide chain from amino acid reside 443 onwards and up to the C-terminus, and in SEQ.ID. NO: 2 from amino acid residue 413 onwards (ApH 49), in SEQ.ID. NO: 27 from amino acid residue 462 onwards (ApH 57), and in SEQ.ID. NO: 12 from amino acid residue 413 onwards. It is noted that the C-lobe handle domain and the C-lobe 3-barrel domain may be connected by a short loop (denoted as “L24” in FIG. 1 and FIG. 2) It is further noted that the term C-lobe domain, as used herein, is specifically intended to include, not only the C-lobe β-barrel domain, but also the handle domain forming a β-sheet structure, comprised typically of approximately 90 or more amino acid residues, and located N-terminally relative to the C-lobe β-barrel structure. The term C-lobe domain, as used herein, further includes, without limitation all polypeptides set forth in SEQ.ID NO: 5; SEQ.ID NO: 6; SEQ.ID NO: 22; SEQ.ID NO: 33; SEQ.ID NO: 34; SEQ.ID NO: 119; SEQ.ID NO: 125; SEQ.ID NO: 179 to SEQ.ID NO: 195; SEQ.ID NO: 213 to SEQ.ID NO: 218; SEQ.ID NO: 230; SEQ.ID NO: 232; SEQ.ID NO: 234 to SEQ.ID NO: 278; and SEQ.ID NO: 288 to SEQ.ID NO: 292.

[0090] The term “loop domain” refers to the polypeptide sequences in a HIBP surface receptor protein that connect two β-strands. These polypeptide sequences may vary considerably in length from several amino acid residues to 150 or more amino acid residues.

[0091] The terms “TbpB”, “TbpB protein”, “TbpB polypeptide”, as interchangeably used herein, refer to any and all transferrin binding protein B sequences, including all bacterial TbpB polypeptides and polypeptides comprising a sequence of amino acid residues which is (i) substantially identical to the amino acid sequences constituting any TbpB polypeptides set forth herein, including, without limitation, SEQ.ID NO: 2; SEQ.ID NO: 12; SEQ.ID NO: 28; SEQ.ID NO: 107 to SEQ.ID NO: 115; SEQ ID NO: 117; SEQ.ID NO: 123; SEQ.ID NO: 131 to SEQ.ID NO: 147; SEQ.ID NO: 177; SEQ.ID NO: 178; SEQ.ID NO: 196 to SEQ.ID NO: 204; SEQ.ID NO: 206 to SEQ.ID NO: 212; and SEQ.ID NO: 219 to SEQ.ID NO: 228, or (ii) encoded by a nucleic acid sequence capable of hybridizing under at least moderately stringent conditions to any nucleic acid sequence encoding any TbpB polypeptide set forth herein or capable of hybridizing under at least moderately stringent conditions to any nucleic acid sequence encoding any TbpB polypeptide set forth herein, but for the use of synonymous codons. The terms further include mature TbpB polypeptides as well as any TbpB precursor, including any pre-TbpB, or TbpB comprising an N-terminal or other signal sequence.

[0092] The terms “LbpB”, “LbpB protein”, “LbpB polypeptide”, as interchangeably used herein, refer to any and all lactoferrin binding protein B sequences including all bacterial LbpB polypeptides and a polypeptides comprising a sequence of amino acid residues which is (i) substantially identical to the amino acid sequences constituting any LbpB polypeptides set forth herein, including, without limitation, SEQ.ID NO: 285 or (ii) encoded by a nucleic acid sequence capable of hybridizing under at least moderately stringent conditions to any nucleic acid sequence encoding any LbpB polypeptide set forth herein or capable of hybridizing under at least moderately stringent conditions to any nucleic acid sequence encoding any LbpB polypeptide set forth herein, but for the use of synonymous codons. The terms further include any LbpB precursor, including pre-LbpB.

[0093] The terms “TbpA”, “TbpA protein”, “TbpA polypeptide”, as interchangeably used herein, refer to any and all transferrin binding protein A sequences including all bacterial TbpA polypeptides and polypeptides comprising a sequence of amino acid residues which is (i) substantially identical to the amino acid sequences constituting any TbpA polypeptides set forth herein, including, without limitation, SEQ.ID NO: 152 or (ii) encoded by a nucleic acid sequence capable of hybridizing under at least moderately stringent conditions to any nucleic acid sequence encoding any TbpA polypeptide set forth herein or capable of hybridizing under at least moderately stringent conditions to any nucleic acid sequence encoding any TbpA polypeptide set forth herein, but for the use of synonymous codons. The terms further include any TbpA precursor, including pre-TbpA.

[0094] The terms “LbpA”, “LbpA protein”, “LbpA polypeptide”, as interchangeably used herein, refer to any and all lactoferrin binding protein A sequences including all bacterial LbpA polypeptides and a polypeptides comprising a sequence of amino acid residues which is (i) substantially identical to the amino acid sequences constituting any LbpA polypeptides set forth herein, including, without limitation, SEQ.ID NO: 162, or (ii) encoded by a nucleic acid sequence capable of hybridizing under at least moderately stringent conditions to any nucleic acid sequence encoding any LbpA polypeptide set forth herein or capable of hybridizing under at least moderately stringent conditions to any nucleic acid sequence encoding any LbpA polypeptide set forth herein, but for the use of synonymous codons. The terms further include any LbpA precursor, including pre-LbpA.

[0095] The term “nucleic acid sequence” as used herein refers to a sequence of nucleoside or nucleotide monomers consisting of naturally occurring bases, sugars and intersugar (backbone) linkages. The term also includes modified or substituted sequences comprising non-naturally occurring monomers or portions thereof. The nucleic acid sequences of the present disclosure may be deoxyribonucleic acid sequences (DNA) or ribonucleic acid sequences (RNA) and may include naturally occurring bases including adenine, guanine, cytosine, thymidine and uracil. The sequences may also contain modified bases. Examples of such modified bases include aza and deaza adenine, guanine, cytosine, thymidine and uracil, and xanthine and hypoxanthine.

[0096] The herein interchangeably used terms “nucleic acid sequence encoding a HIBP surface receptor protein” and “nucleic acid sequence encoding a HIBP surface receptor polypeptide”, refer to any and all nucleic acid sequences encoding a HIBP surface receptor protein, including any HIBP surface receptor protein and any nucleic acid sequences that encode HIBP surface receptor protein precursors, including, without limitation, those set forth in SEQ.ID NO: 1; SEQ.ID NO: 11; SEQ.ID NO: 27; SEQ.ID NO: 116; SEQ.ID NO: 122; and SEQ.ID NO: 173. As used herein “HIBP surface receptor protein precursor” refers to a HIBP surface receptor protein molecule additionally comprising an N-terminal signal sequence which facilitates export of the polypeptide chain across the cytoplasmic membrane. Nucleic acid sequences encoding a HIBP surface receptor protein further include any and all nucleic acid sequences which (i) encode polypeptides that are substantially identical to the HIBP surface receptor proteins sequences set forth herein; or (ii) hybridize to any HIBP surface receptor protein nucleic acid sequences set forth herein under at least moderately stringent hybridization conditions or which would hybridize thereto under at least moderately stringent conditions but for the use of synonymous codons.

[0097] The herein interchangeably used terms “nucleic acid sequence encoding an IOM protein” and “nucleic acid sequence encoding an IOM polypeptide”, refer to any and all nucleic acid sequences encoding an IOM protein, including any IOM protein and any nucleic acid sequences that encode IOM protein precursors, including, without limitation, those set forth in SEQ.ID NO: 151 and SEQ.ID NO: 161. As used herein “IOM protein precursor” refers to an IOM protein molecule additionally comprising an N-terminal signal sequence which facilitates export of the polypeptide chain across the cytoplasmic membrane. Nucleic acid sequences encoding a IOM protein further include any and all nucleic acid sequences which (i) encode polypeptides that are substantially identical to the IOM proteins sequences set forth herein; or (ii) hybridize to any IOM protein nucleic acid sequences set forth herein under at least moderately stringent hybridization conditions or which would hybridize thereto under at least moderately stringent conditions but for the use of synonymous codons.

[0098] The herein interchangeably used terms “nucleic acid sequence encoding TbpB”; “nucleic acid sequence encoding a TbpB polypeptide”, refer to any and all nucleic acid sequences encoding a TbpB polypeptide, including any TbpB polypeptide, including, without limitation, the sequences set forth in SEQ.ID NO: 1; SEQ.ID NO: 11; SEQ.ID NO: 27; SEQ.ID NO: 116; SEQ.ID NO: 122; and SEQ.ID NO: 173, and further including any nucleic acid sequences that encode TbpB precursors. As used herein “TbpB precursor” refers to a TbpB molecule additionally comprising an N-terminal signal sequence which facilitates export of the polypeptide chain across the cytoplasmic membrane. Nucleic acid sequences encoding a TbpB polypeptide further include any and all nucleic acid sequences which (i) encode polypeptides that are substantially identical to the TbpB polypeptide sequences set forth herein; or (ii) hybridize to any TbpB nucleic acid sequences set forth herein under at least moderately stringent hybridization conditions or which would hybridize thereto under at least moderately stringent conditions but for the use of synonymous codons.

[0099] The herein interchangeably used terms “nucleic acid sequence encoding LbpB”; “nucleic acid sequence encoding a LbpB polypeptide”, refer to any and all nucleic acid sequences encoding a LbpB polypeptide, including any LbpB polypeptide, including, without limitation the sequence set forth in SEQ.ID NO: 284 and any nucleic acid sequences that encode LbpB precursors. As used herein “LbpB precursor” refers to a LbpB molecule additionally comprising an NI-terminal signal sequence which facilitates export of the polypeptide chain across the cytoplasmic membrane. Nucleic acid sequences encoding a LbpB polypeptide further include any and all nucleic acid sequences which (i) encode polypeptides that are substantially identical to the LbpB polypeptide sequences set forth herein; or (ii) hybridize to any LbpB nucleic acid sequences set forth herein under at least moderately stringent hybridization conditions or which would hybridize thereto under at least moderately stringent conditions but for the use of synonymous codons.

[0100] The herein interchangeably used terms “nucleic acid sequence encoding TbpA”; “nucleic acid sequence encoding a TbpA polypeptide”, refer to any and all nucleic acid sequences encoding a TbpA polypeptide, including any TbpA polypeptide, including, without limitation, the nucleic acid sequence set forth in SEQ.ID NO: 151, and any nucleic acid sequences that encode TbpA precursors. As used herein “TbpA precursor” refers to a TbpA molecule additionally comprising an N-terminal signal sequence which facilitates export of the polypeptide chain across the cytoplasmic membrane. Nucleic acid sequences encoding a TbpA polypeptide further include any and all nucleic acid sequences which (i) encode polypeptides that are substantially identical to the TbpA polypeptide sequences set forth herein; or (ii) hybridize to any TbpA nucleic acid sequences set forth herein under at least moderately stringent hybridization conditions or which would hybridize thereto under at least moderately stringent conditions but for the use of synonymous codons.

[0101] The herein interchangeably used terms “nucleic acid sequence encoding LbpA”; “nucleic acid sequence encoding a LbpA polypeptide”, refer to any and all nucleic acid sequences encoding a LbpA polypeptide, including any LbpA polypeptide, including, without limitation, the nucleic acid sequence set forth in SEQ.ID NO: 161 and any nucleic acid sequences that encode LbpA precursors. As used herein “LbpA precursor” refers to a LbpA molecule additionally comprising an N-terminal signal sequence which facilitates export of the polypeptide chain across the cytoplasmic membrane. Nucleic acid sequences encoding a LbpA polypeptide further include any and all nucleic acid sequences which (i) encode polypeptides that are substantially identical to the LbpA polypeptide sequences set forth herein; or (ii) hybridize to any LbpA nucleic acid sequences set forth herein under at least moderately stringent hybridization conditions or which would hybridize thereto under at least moderately stringent conditions but for the use of synonymous codons.

[0102] By the term “substantially identical” it is meant that two polypeptide sequences preferably are at least 50% identical, and more preferably are at least 85% identical and most preferably at least 95% identical, for example 96%, 97%, 98% or 99% identical. In order to determine the percentage of identity between two polypeptide sequences the amino acid sequences of such two sequences are aligned, using for example the alignment method of Needleman and Wunsch (26), as revised by Smith and Waterman (27) so that the highest order match is obtained between the two sequences and the number of identical amino acids is determined between the two sequences. A preferred, broadly applicable, method for accurately aligning two polypeptides involves the Clustal W algorithm (28) employed with the BLOSUM 62 scoring matrix (29) using a gap opening penalty of 10 and a gap extension penalty of 0.1. This enables identification of high scoring alignments between two sequences, wherein at least 50% of the total length of one of the two sequences is involved in the alignment. Methods to calculate the percentage identity between two aligned amino acid sequences are generally art recognized and include, for example, those described by Carillo and Lipton (30) and those described in Computational Molecular Biology, Lesk, e.d. Oxford University Press, New York, 1988, Biocomputing: Informatics and Genomics Projects. Generally, computer programs will be employed for such calculations. Computer programs that may be used in this regard include, but are not limited to, GCG (31) BLASTP, BLASTN and FASTA (32).

[0103] By “at least moderately stringent hybridization conditions” it is meant that conditions are selected which promote selective hybridization between two complementary nucleic acid molecules in solution. Hybridization may occur to all or a portion of a nucleic acid sequence molecule. The hybridizing portion is typically at least 15 (e.g. 20, 25, 30, 40 or 50) nucleotides in length. Those skilled in the art will recognize that the stability of a nucleic acid duplex, or hybrids, is determined by the Tm, which in sodium containing buffers is a function of the sodium ion concentration and temperature (Tm=81.5° C.−16.6 (Log 10 [Na+])+0.41(% (G+C)−600/l), or similar equation). Accordingly, the parameters in the wash conditions that determine hybrid stability are sodium ion concentration and temperature. In order to identify molecules that are similar, but not identical, to a known nucleic acid molecule a 1% mismatch may be assumed to result in about a 1° C. decrease in Tm, for example if nucleic acid molecules are sought that have a >95% identity, the final wash temperature will be reduced by about 5° C. Based on these considerations those skilled in the art will be able to readily select appropriate hybridization conditions. In preferred embodiments, stringent hybridization conditions are selected. By way of example the following conditions may be employed to achieve stringent hybridization: hybridization at 5× sodium chloride/sodium citrate (SSC)/5×Denhardt's solution/1.0% SDS at Tm (based on the above equation)−5° C., followed by a wash of 0.2×SSC/0.1% SDS at 60° C. Moderately stringent hybridization conditions include a washing step in 3×SSC at 42° C. It is understood however that equivalent stringencies may be achieved using alternative buffers, salts and temperatures. Additional guidance regarding hybridization conditions may be found in: Green and Sambrook, Molecular Cloning, a Laboratory Manual, Cold Spring Harbor Laboratory Press, 2012 (33).

[0104] The term “chimeric” as used herein in the context of nucleic acid sequences refers to at least two linked nucleic acid sequences which are not naturally linked. Chimeric nucleic acid sequences include linked nucleic acid sequences of different natural origins. For example, a nucleic acid sequence constituting a bacterial promoter linked to a nucleic acid sequence of a TbpB polypeptide or a HIBP surface receptor protein is considered chimeric, and a nucleic acid sequence encoding a TbpB polypeptide from which certain portions have been removed and replaced with portions of a TbpA polypeptide is considered chimeric. Chimeric nucleic acid sequences also may comprise nucleic acid sequences of the same natural origin, provided they are not naturally linked. For example a nucleic acid sequence constituting a promoter obtained from a particular cell-type may be linked to a nucleic acid sequence encoding a polypeptide obtained from that same cell-type, but not normally linked to the nucleic acid sequence constituting the promoter. Chimeric nucleic acid sequences also include nucleic acid sequences comprising any naturally occurring nucleic acid sequence linked to any non-naturally occurring nucleic acid sequence.

[0105] By the term “substantially unable to bind host iron binding protein” it is meant that the ability of the host iron binding protein to bind to the HIBP surface receptor protein is diminished in such a manner that the value of the binding constant (Kd) or dissociation constant of the binding interaction between the native host iron binding protein (i.e. the host iron binding protein present in the host organism) and the modified HIBP surface receptor protein is at least 10× higher than the value of the binding constant of the binding interaction between the native host iron binding protein and its complementary native HIBP surface receptor protein. In other words, the modified proteins have a 10× lower affinity for binding native host iron binding protein than the native receptor protein. In preferred embodiments, the relative affinity for binding native host iron binding protein by the modified protein is 30× lower than that of the native HIBP surface receptor protein, and, in most preferred embodiments, the relative affinity for binding native host iron binding protein by the modified protein is 100× lower than that of the native HIBP surface receptor protein. In further preferred embodiments, the binding constant between the modified HIBP surface receptor protein and the native host iron binding protein is at least 300 nM. Preferably the binding constant is at least 500 nM, and most preferably at least 1 μM.

[0106] The term “substantially free” as used herein is a term of degree meaning that a composition does not contain significant amounts of a compound of which the composition is said to be substantially free of. When a composition is substantially free of a compound, for example substantially free of N-lobe domain, such composition comprises preferably less than 5.0% of such compound, more preferably less than 1.0% of such compound, and most preferably less than 0.1% of such compound.

### Immunogenic Compositions

[0107] As hereinbefore mentioned, the present disclosure provides, in at least one embodiment, an immunogenic composition comprising an HIBP surface receptor protein from a Gram-negative pathogenic bacterial species, wherein the HIBP surface receptor protein has been modified in such a manner that it is unable to substantially bind a host iron binding protein. The term “modified” in conjunction with a HIBP surface receptor protein is intended to refer to a non-native HIBP surface receptor protein from which at least one amino acid residue has been removed or in which at least one amino acid residue has been replaced by another, or an HIBP surface receptor protein which has been fragmented in two or more separate polypeptides. Thus modified HIBP surface receptor proteins include, without limitation, truncated HIBP surface receptor proteins (e.g. an N-lobe domain or C-lobe domain of an HIBP surface receptor protein); HIBP surface receptor proteins from which one or more amino acid residues have been removed (e.g. an HIBP surface receptor protein from which one or more amino acids from the loop-domains within the N-lobe domain or C-lobe domain have been removed); HIBP surface receptor proteins in which additional amino acids have been inserted (e.g. HIBP surface receptor proteins in which one or more amino acids have been added to the loop-domains within the N-lobe domain or C-lobe domain); multimeric or extended HIBP polypeptides (e.g. dimers and trimers and N-lobe domain or C-lobe domain dimers and trimers); HIBP surface receptor proteins which have been modified by site-directed mutagenesis to alter one or more amino acids; and mixtures of two or more HIBP surface receptor protein polypeptides (e.g. a mixture comprising a separate N-lobe domains and a C-lobe domains of an HIBP surface receptor protein). The modified HIBP surface receptor proteins of the present disclosure are unable to substantially bind native host iron binding protein.

[0108] As hereinbefore mentioned, the present disclosure provides, in one aspect, an immunogenic composition comprising or consisting of a polypeptide comprising a C-lobe domain or an N-lobe domain of an HIBP surface receptor protein obtainable from or obtained from a Gram-negative bacterial species, wherein the polypeptide is unable to substantially bind host iron binding protein. In further aspects, the present disclosure provides a polypeptide comprising a G-lobe domain or an N-lobe domain of an HIBP surface receptor protein wherein the C-lobe domain or the N-lobe domain comprises a plurality of β-strands connected by a plurality of loop domains, and wherein at least one loop domain of the plurality of loop domains has been modified, and wherein the polypeptide is unable to substantially bind host iron binding protein.

[0109] In accordance with the present disclosure, any polypeptide or nucleic acid sequence encoding such polypeptide, comprising or consisting of a C-lobe domain or an N-lobe domain of an HIBP surface receptor protein obtainable from a Gram-negative pathogenic bacterial species may be used.

[0110] In embodiments of the disclosure where the native C-lobe domain is used, the polypeptide comprising the native C-lobe domain does not comprise and is not chemically linked via a peptide bond to the native N-lobe domain of the HIBP surface receptor protein, and is thus an isolated native C-lobe domain, i.e. a native C-lobe domain separated from the native N-lobe domain. Thus in certain embodiments, preparations comprising a C-lobe domain of an HIBP surface receptor polypeptide free or substantially free of N-lobe domain of an HIBP surface receptor polypeptide, or portions thereof, are provided. In embodiments of the disclosure where the native N-lobe domain is used, the polypeptide comprising the native N-lobe domain used herein does not comprise and is not chemically linked via a peptide bond to the native C-lobe domain of the HIBP surface receptor protein, and is thus an isolated native N-lobe domain, i.e. an N-lobe domain separated from the native C-lobe domain. Thus in certain embodiments, preparations comprising an N-lobe domain of an HIBP surface receptor polypeptide free or substantially free of C-lobe domain of an HIBP surface receptor polypeptide, or portions thereof, are provided. In certain embodiments however, a mixture of a native C-lobe domain, or portions thereof, and the native N-lobe domain, or portions thereof, may be used, provided however, that the N-lobe domain and the C-lobe domain are not chemically linked, i.e. they are not chemically connected by a peptide bond. Thus the present disclosure includes an immunogenic composition comprising a mixture of polypeptides comprising an N-lobe domain and a polypeptide comprising a C-lobe domain, wherein the N-lobe domain and C-lobe domain are not physically linked.

[0111] To source the polypeptides of the present disclosure any HIBP surface receptor protein, or TbpB polypeptide obtainable from or obtained from any Gram-negative bacterial species may be used, including, but not limited to, any pathogenic bacterial species or strain, and including, but not limited to, any bacterial species belonging to the bacterial families of Pasteurellaceae, Moxarellaceae or Neisseriaceae, and bacterial species belonging to the bacterial genus Actinobacillus, Neisseria, Haemophilus, Mannheimia, Histophilus, Pasteurella or Moraxella. The polypeptides further include any polypeptides obtainable from or obtained from any HIBP surface receptor protein, or any polypeptides obtainable from or obtained from any TbpB polypeptide obtainable or obtained from the following bacterial species: Actinobacillus pleuropneumoniae (12, 34), Actinobacillus suis, Haemophilus influenzae (35, 36), Haemophilus parasuis (37), Haemophilus somnus (also known to the art as Histophilus somnus) (38), Mannheimia haemolytica (also known to the art as Pasteurella haemolytica) (39), Moraxella catarrhalis (40), Moraxella bovis, Neisseria gonorrhoeae, Neisseria meningitidis (41, 42), Mannheimia glucosida (also known to the art as Pasteurella haemolytica) and Bibersteinia trehalosi (also known to the art as Pasteurella trehalosi).

[0112] Exemplary C-lobe domain and N-lobe domain polypeptides that may be used in accordance herewith further include, any C-lobe domain set forth in SEQ.ID NO: 5; SEQ.ID NO: 6; SEQ.ID NO: 22; SEQ.ID NO: 33; SEQ.ID NO: 34; SEQ.ID NO: 119; SEQ.ID NO: 125; SEQ.ID NO: 179 to SEQ.ID NO: 195; SEQ.ID NO: 213 to SEQ.ID NO: 218; SEQ.ID NO: 230; SEQ.ID NO: 232; SEQ.ID NO: 234 to SEQ.ID NO: 278, and SEQ.ID NO: 288 to SEQ.ID NO: 292, and any N-lobe domain set forth in SEQ.ID NO: 8; SEQ.ID NO: 10; SEQ.ID NO: 24; SEQ.ID NO: 26; SEQ.ID NO: 36; SEQ.ID NO: 38; SEQ.ID NO: 121; SEQ.ID NO: 127; SEQ.ID NO: 229; SEQ.ID NO: 231; and SEQ.ID NO: 233, and further include any C-lobe domain or N-lobe domain that may be prepared from a HIBP polypeptide or a TbpB polypeptide including, without limitation the polypeptides set forth in SEQ.ID NO: 2; SEQ.ID NO: 12; SEQ.ID NO: 28; SEQ.ID NO: 107 to SEQ.ID NO: 115; SEQ ID NO: 117; SEQ.ID NO: 123; SEQ.ID NO: 131 to SEQ.ID NO: 147; SEQ.ID NO: 177; SEQ.ID NO: 178; SEQ.ID NO: 196 to SEQ.ID NO: 204; SEQ.ID NO: 206 to SEQ.ID NO: 212; and SEQ.ID NO: 219 to SEQ.ID NO: 228 or by using the nucleic acid sequences encoded by SEQ.ID NO: 1; SEQ.ID NO: 11; SEQ.ID NO: 27; SEQ.ID NO: 116; SEQ.ID NO: 122; and SEQ.ID NO; 173. Using these nucleic acid sequences and polypeptide sequences, additional novel HIBP surface receptor proteins and TbpB sequences, and C-lobe domains or N-lobe domains may readily be identified by those of skill in the art. For example expression libraries, cDNA libraries and genomic libraries may be screened and databases comprising sequence information may be searched for similar sequences.

[0113] The immunogenic preparations of the present disclosure elicit, upon administration thereof to a vertebrate subject, an immune response in such vertebrate subject, in the form of the stimulation of antibody production by the vertebrate subject. In accordance herewith, such antibodies are reactive against at least one Gram-negative bacterial strain. Preferably, however, the antibodies are cross-reactive and/or cross-protective against a plurality of bacterial strains or species, and preferably such cross-reactivity and/or cross-protection is attained in a host expressing one or more host iron binding proteins, such as transferrin or lactoferrin. The term “cross-reactive” as used herein refers to the ability of the immune response induced by an immunogenic composition obtained from one bacterial strain to stimulate the production of antibodies capable of additionally reacting with a different bacterial strain or different species. The term “cross-protective” as used herein refers to the ability of the immune response, induced by an immunogenic composition obtained from one bacterial strain, to prevent or attenuate infection or disease by at least one additional bacterial strain or bacterial species. In preferred embodiments of the present disclosure, the immunogenic compositions of the present disclosure are cross-reactive and/or cross-protective against a plurality of bacterial strains or bacterial species, for example, 2, 3, 4, 5, 6, 7, 8, 9 or 10 bacterial species or bacterial strains. Cross-reactivity is deemed to be an indicator of cross-protection. It will be readily appreciated by those of skill in the art that the foregoing aspect of the present disclosure facilitates vaccine manufacture by permitting the production of one immunogenic compound, i.e. an immunogenic compound obtainable from one HIBP surface receptor protein, which offers protection against multiple infectious bacterial strains or bacterial species.

[0114] The immunogenic preparations of the present disclosure generate an unexpectedly effective immune response in vertebrate subjects, and notably in vertebrate subjects expressing host iron binding proteins, such as transferrin and lactoferrin, exceeding the effectiveness of the immune response generated when immunizing preparations using native HIBP protein are used. One aspect of the effective immune response is the magnitude of the immune response. Preferably the antibody titre obtained using the immunogenic compositions of the present disclosure exceeds the antibody titre of a native HIBP protein by a factor of at least 2×, more preferably by a factor of at least 5×, most preferably by a factor of at least 10×.

[0115] In preferred embodiments, mixtures comprising at least two polypeptides, each polypeptide comprising or consisting of a C-lobe domain are used; or mixtures comprising at least two polypeptides, each polypeptide comprising or consisting of an N-lobe domain, are used; or mixtures comprising at least three polypeptides comprising or consisting of at least two C-lobe domains and at least one N-lobe domain, are used; or mixtures comprising at least three polypeptides comprising or consisting of at least two N-lobe domains and at least one C-lobe domain, are used. In preferred embodiments, the at least two polypeptides are obtainable or obtained from a Gram-negative bacterial genus or species capable of infecting the same vertebrate species. Thus, the at least two polypeptides would be selected from e.g. two C-lobe domains of an TbpB polypeptide, wherein both C-lobe domains are obtainable or obtained from a TbpB polypeptide obtained or obtainable from an Actinobacillus strain capable of infecting pigs, or e.g. two C-lobe domains of a TbpB polypeptide, wherein both C-lobe domains are obtainable or obtained from an TbpB polypeptide obtained or obtainable from a Haemophilus strain capable of infecting cows. In embodiments wherein at least two C-lobe domains are used, the mixtures are preferably free, or substantially free, of N-lobe domains or portions thereof. In embodiments wherein at least two N-lobe domains are used the mixtures are preferably free or substantially free of C-lobe domains or portions thereof

[0116] In particularly preferred embodiments, in accordance with the present disclosure, mixtures of at least two polypeptides, each polypeptide comprising or consisting of a C-lobe domain of an HIBP surface receptor protein obtainable or obtained from a Gram-negative bacterial species are used. In such embodiments, the mixtures are preferably free from N-lobe domains or portions thereof. In particularly preferred embodiments, any two C-lobe domains obtainable or obtained from the HIBP surface receptor polypeptides set forth in SEQ.ID NO: 2; SEQ.ID NO: 12; SEQ.ID NO: 28; SEQ.ID NO: 107 to SEQ.ID NO: 115; SEQ ID NO: 117; SEQ.ID NO: 123; SEQ.ID NO: 131 to SEQ.ID NO: 147; SEQ.ID NO: 177; SEQ.ID NO: 178; SEQ.ID NO: 196 to SEQ.ID NO: 204; SEQ.ID NO: 206 to SEQ.ID NO: 212; and SEQ.ID NO: 219 to SEQ.ID NO: 228 are used; or any two C-lobe domains obtainable or obtained from the nucleic acid sequences set forth in SEQ.ID NO: 1; SEQ.ID NO: 11; SEQ.ID NO: 27; SEQ.ID NO: 116; SEQ.ID NO: 122; and SEQ.ID NO: 173 are used. In further preferred embodiments, any two C-lobe domains selected from the C-lobe domains set forth in SEQ.ID NO: 5; SEQ.ID NO: 6; SEQ.ID NO: 22; SEQ.ID NO: 33; SEQ.ID NO: 34; SEQ.ID NO: 119; SEQ.ID NO: 125; SEQ.ID NO: 179 to SEQ.ID NO: 195; and SEQ.ID NO: 213 to SEQ.ID NO: 218; SEQ.ID NO: 230: SEQ.ID NO: 232; SEQ.ID NO: 234 to SEQ.ID NO: 278; and SEQ.ID NO: 288 to SEQ.ID NO: 292 are used.

[0117] In further particularly preferred embodiments, at least two C-lobe domains obtainable or obtained from an HIBP surface receptor protein are used, wherein at least one C-lobe domain is obtainable or obtained from a bacterial species belonging to the bacterial genus of Actinobacillus, Haemophilus, Histophilus, Mannheimia, Moraxella, Neisseria, Pasteurella and Bibersteinia.

[0118] In further particularly preferred embodiments, at least two C-lobe domains are used, wherein at least one C-lobe domain is obtainable or obtained from an HIBP surface receptor protein obtainable or obtained from Actinobacillus pleuropneumoniae, preferably the C-lobe domain set forth in SEQ.ID. NO: 6 or SEQ.ID NO: 22, or wherein at least one C-lobe domain is obtainable or obtained from an HIBP surface receptor protein obtainable or obtained from Actinobacillus suis preferably the C-lobe domain set forth in SEQ.ID NO: 34.

[0119] In further particularly preferred embodiments, at least two C-lobe domains are used, wherein at least one C-lobe domain is obtainable or obtained from an HIBP surface receptor protein obtainable or obtained from Mannheimia haemolytica preferably the C-lobe domain set forth in SEQ.ID NO: 232; or SEQ.ID NO: 234, or wherein at least one C-lobe domain is obtainable or obtained from an HIBP surface receptor protein obtainable or obtained from Mannheimia glucosida.

[0120] In further particularly preferred embodiments, at least two C-lobe domains are used, wherein at least one C-lobe domain is obtainable or obtained from an HIBP surface receptor protein obtainable or obtained from Neisseria gonorrhoeae preferably one of the C-lobe domains set forth in SEQ.ID NO: 213 to SEQ.ID NO: 218, or wherein at least one C-lobe domain is obtainable or obtained from an HIBP surface receptor protein obtainable or obtained from Neisseria meningitidis preferably one of the C-lobe domains set forth in SEQ.ID. NO: 119; SEQ.ID NO: 125; SEQ.ID NO: 128; SEQ.ID NO: 129; SEQ.ID NO: 130; SEQ.ID NO: 131; SEQ.ID NO: 152; SEQ.ID NO: 154; SEQ.ID NO: 156; SEQ.ID NO: 158; SEQ.ID NO: 160; SEQ.ID NO: 164; SEQ.ID NO: 166; SEQ.ID NO: 168; SEQ.ID NO: 179 to SEQ.ID NO: 195; and SEQ.ID NO: 235 to SEQ.ID NO: 278.

[0121] In further particularly preferred embodiments, at least two C-lobe domains are used, wherein at least one C-lobe domain is obtainable or obtained from an HIBP surface receptor protein obtainable or obtained from Bibersteinia trehalosi, preferably the C-lobe domain set forth in SEQ.ID.NO: 292.

[0122] In further preferred embodiments, at least two C-lobe domains obtainable or obtained from a HIBP surface receptor polypeptide are used, wherein both of the two C-lobe domains are obtainable or obtained from two bacterial species selected from Actinobacillus pleuropneumoniae, preferably, the C-lobe domain set forth in SEQ.ID NO: 6 or SEQ.ID NO: 22, Actinobacillus suis, preferably the C-lobe domain set forth in SEQ.ID NO: 34 and Haemophilus parasuis, preferably the C-lobe domain set forth in SEQ.ID NO: 294.

[0123] In further preferred embodiments, at least two C-lobe domains obtainable or obtained from a HIPB surface receptor polypeptide are used, wherein one of the two C-lobe domains are obtainable or obtained from Neisseria gonorrhoeae, preferably, one of the C-lobe domains set forth in SEQ.ID. NO: 213 to SEQ.ID. NO: 218 and the other C-lobe domain is obtainable from Neisseria meningitidis preferably one of the C-lobe domains set forth in. SEQ.ID. NO: 119; SEQ.ID NO: 125; SEQ.ID NO: 128; SEQ.ID NO: 129; SEQ.ID NO: 130; SEQ.ID NO: 131; SEQ.ID NO: 152; SEQ.ID NO: 154; SEQ.ID NO: 156; SEQ.ID NO: 158; SEQ.ID NO: 160; SEQ.ID NO: 164; SEQ.ID NO: 166; SEQ.ID NO: 168; SEQ.ID NO: 179 to SEQ.ID NO: 195; and SEQ.ID NO: 235 to SEQ.ID NO: 278.

[0124] In further preferred embodiments, at least two C-lobe domains obtainable or obtained from a HIPB surface receptor polypeptide are used, wherein one of the two C-lobe domains is obtainable or obtained from Mannheimia haemolytica, preferably a C-lobe domain set forth in SEQ.ID NO: 232; or SEQ.ID NO: 234, and the other C-lobe is obtainable or obtained from Bibersteinia trehalosi preferably a C-lobe domain set forth in SEQ.ID NO: 292.

[0125] In further preferred embodiments, at least two C-lobe domains obtainable or obtained from a TbpB polypeptide are used, wherein both of the two C-lobe domains are obtainable or obtained from one or from two bacterial species, and wherein the TbpB polypeptides or the C-lobe domains obtained therefrom are antigenically divergent. The TbpB or C-lobe domains are preferably obtained from bacterial species or bacterial strains capable of exchanging TbpB variants. The term “antigenically divergent” as used herein in relation to two TbpB polypeptides or C-lobe domains of TbpB polypeptides means that the two TbpB polypeptides or C-lobe domains of TbpB polypeptides when used to construct a phylogenetic tree using a representative number of TbpB polypeptides or C-lobe domain polypeptides belong to divergent branches or groups of a phylogenetic tree. In accordance herewith, a phylogenetic tree with any amount of TbpB or C-lobe domain polypeptides may be constructed, however preferably a phylogenetic tree is constructed using at least 25 TbpB polypeptides or C-lobe domain polypeptides, more preferably at least 30, at least 40, or at least 50 TbpB polypeptides or C-lobe domain polypeptides, and preferably a phylogenetic tree is constructed in such a manner that it comprises at least 2 node orders above the root level, more preferably a phylogenetic tree comprises at least 3, 4, or 5 node orders above the root level, most preferably, at least 6, 7, 8, 9, or 10 node orders above the root level (as further explained below and in FIG. 30). Antigenically divergent TbpB polypeptides or C-lobe domain polypeptides preferably belong to distinct branches which (i) diverge at a node at least 2 node orders below the highest order node of the phylogenetic tree (e.g. if the highest order node of a phylogenetic tree is the 9^{th} order node, antigenically divergent polypeptides are those polypeptides diverging at the 7^{th} order node, or a lower order node, i.e. the 6^{th}, 5^{th}, 4^{th}, 3^{rd}, 2^{nd} or 1^{st} order node; and/or (ii) diverge at a 1^{st}, 2^{nd} or 3^{rd} node order of a phylogenetic tree. Several computer programs may be used to facilitate construction of phylogenetic trees using TbpB polypeptides or C-lobe domain polypeptides including: (i) computer programs performing sequence alignments, such as a program using the M-Coffee alignment algorithm as implemented on the T-Coffee server site (http://www.tcoffee.org/) (43); (ii) computer programs editing alignments, such as Geneious Pro (44); (iii) computer programs automatically cleaning alignments, such as GBlocks (45); (iv) computer programs selecting an evolutionary model compatible with the alignment, such as ProtTest v3.2 (Darriba et al, 2011) and (iv) computer programs generating phylogenetic trees such as programs using the Maximum likelihood method, PhyML (46), running on the general time reversible (GTR) model (47) (48, 49), or other model such as the JTT+I+G+F model, or the WAG+G=F model, or programs such as PHYLIP and PAUP (University of Washington). Each of these programs is preferably configured so that the tree branches are deemed to be statistically significant. It is noted however that the more distally located branches may be less statistically significant, thus selection of strains belonging to groups based from the lowest order nodes is preferred.

[0126] Now referring to FIG. 30, there is shown, for illustrative purposes, a phylogenetic tree 100 having a root 120, intermediate branches (as illustrated by 130, 131, 140, 141, 142 and 143), and a total of 38 distal branches (as illustrated by distal branches 150, 151, 152, 153, 154 and 155), each distal branch representing a related polypeptide obtained from 1 of 38 bacterial strains (strain 1-38 (110)). Each branch shown originates from a node (as illustrated by nodes 161, 171, 172, 181, 182, 183 and 184). Thus, for example, branch 130 originates from node 161 and branch 143 originates from node 172. The node (161) most proximal to the tree root (120) is more specifically referred to as the first order node 161; nodes 171 and 172 are more specifically referred to as 2^{nd} order nodes 171 and 172; nodes 181, 182, 183 and 184 are more specifically referred to as 3^{rd} order nodes 181, 182, 183 and 184, and further nodes, mutatis mutandis, may be referred to as 4^{th}, 5^{th}, 6^{th}, 7^{th} etc. order nodes. Shown in FIG. 30 are further four Groups (Group 1 (105), polypeptides of bacterial strains (110) 1-17; Group 2 (106), polypeptides of bacterial strains (110) 18-24; Group 3 (107), polypeptides of bacterial strains (110) 25-30; and Group 4 (108), polypeptides of bacterial strains (110) 26-38). Polypeptides of bacterial strains belonging to either Group 1 (105) or Group 2 (106) both belong to a branch (131) diverging at the first order node (161) of the phylogenetic tree (100). Similarly, polypeptides of bacterial strains belonging to either Group 3 (105) or Group 4 (106) both belong to a branch (131) diverging at the first order node (161) of the phylogenetic tree (100). Thus polypeptides of all bacterial strains belonging to Group 1 (105) or Group 2 (106) are antigenically divergent from polypeptides of all bacterial strains belonging to Group 3 (107) or Group 4 (108). Polypeptides of bacterial strains belonging to Group 1 (105) or Group 2 (106) belong to groups diverging at the 2^{nd} order node (172) of the phylogenetic tree (100). Polypeptides of bacterial strains belonging to Group 1 (105) are in accordance herewith also antigenically divergent from bacterial strains belonging to Group 2 (106). It is noted that phylogenetic trees may be represented in different formats, for example, in a rectangular format, as in FIG. 30, for example, or in circular format as in FIG. 10. Exemplary phylogenetic trees constructed using TbpB polypeptides or C-lobes or TbpB polypeptides are provided in FIG. 4 (comprising strains of Actinobacillus pleuropneumoniae, Actinobacillus suis and Haemophilus parasuis), FIG. 10 (comprising strains of Neisseria meningitidis), FIG. 26 (comprising strains of Neisseria meningitidis and Neisseria gonorrhoeae), FIG. 27 (comprising strains of Haemophilus influenza), FIG. 28 (comprising strains of Mannheimia haemolytica and Bibersteinia trehalosi) and FIG. 29 (comprising strains of Moraxella catharrhalis).

[0127] In further preferred embodiments, at least two C-lobe domains obtainable or obtained from a TbpB polypeptide are used, wherein both of the two C-lobe domains are obtainable or obtained from Actinobacillus pleuropneumoniae, Actinobacillus suis and Haemophilus parasuis. Referring to the phylogenetic tree set forth in FIG. 4, in preferred embodiments, at least two C-lobe domains are used, wherein a first C-lobe domain is obtained from any one of the C-lobe domains selected from a Actinobacillus pleuropneumoniae, Actinobacillus suis or Haemophilus parasuis bacterial strain belonging to phylogenetic Group 1, phylogenetic Group 2 or phylogenetic Group 3, set forth in FIG. 4, and wherein the second C-lobe domain is obtained from any one of the C-lobe domains selected from a Actinobacillus pleuropneumoniae, Actinobacillus suis or Haemophilus parasuis strain belonging to a phylogenetic Group set forth in FIG. 4, other than the phylogenetic Group the first C-lobe domain is selected from. In further preferred embodiments, at least three C-lobe domains are used, wherein a first C-lobe domain belonging to a Actinobacillus pleuropneumoniae, Actinobacillus suis or Haemophilus parasuis bacterial strain belonging to phylogenetic Group 1 set forth in FIG. 4 is used, a second C-lobe domain belonging to Actinobacillus pleuropneumoniae, Actinobacillus suis or Haemophilus parasuis bacterial strain belonging to phylogenetic Group 2 set forth in FIG. 4 is used, and a third C-lobe domain belonging to a Actinobacillus pleuropneumoniae, Actinobacillus suis or Haemophilus parasuis bacterial strain belonging to phylogenetic Group 3 set forth in FIG. 4 is used. Thus by way of specific example, a C-lobe domain from Actinobacillus suis H57 (phylogenetic Group 1; FIG. 4 black arrow)) may be combined with a C-lobe domain from Actinobacillus pleuropneumoniae H87 (phylogenetic Group 2; FIG. 4 black arrow) and a C-lobe domain from Actinobacillus pleuropneumoniae H49 (phylogenetic Group 3; FIG. 4 black arrow).

[0128] In further preferred embodiments, at least two C-lobe domains obtainable or obtained from a TbpB protein are used, wherein both of the two C-lobe domains are obtainable or obtained from Neisseria meningitidis, Referring to the phylogenetic tree set forth in FIG. HA, in preferred embodiments, at least two C-lobe domains are used, wherein a first C-lobe domain is obtained from any one of the C-lobe domains selected from a Neisseria meningitidis bacterial strain belonging to phylogenetic Group 1, phylogenetic Group 2, phylogenetic Group 3 or phylogenetic Group 4 set forth in FIG. 10A, and wherein the second C-lobe domain is obtained from any one of the Neisseria meningitidis strains belonging to a phylogenetic Group set forth in FIG. 10A other than the phylogenetic Group the first C-lobe domain is selected from. Thus by way of example only, a TbpB C-lobe domain obtained from Neisseria meningitidis strain B16B6 (phylogenetic Group 1; FIG. 10A, black arrow) may be combined with a TbpB C-lobe domain from strain M982 (phylogenetic Group 4; FIG. 10A, black arrow). In further preferred embodiments, at least three C-lobe domains are used wherein the C-lobe domains are selected from strains belonging to three different Groups set forth in FIG. 10A (e.g. a C-lobe domain selected from each phylogenetic Group 1, phylogenetic Group 2 and phylogenetic Group 3). In further preferred embodiments, at least four C-lobe domains are used, wherein a first C-lobe domain belonging to a Neisseria meningitidis bacterial strain belonging to Group 1 set forth in FIG. 10A is used, a second C-lobe domain belonging to Neisseria meningitidis bacterial strain belonging to Group 2 set forth in FIG. 10A is used, and a third C-lobe domain belonging to a Neisseria meningitidis bacterial strain belonging to phylogenetic Group 3 set forth in FIG. 10A is used and a fourth C-lobe domain belonging to a Neisseria meningitidis bacterial strain belonging to phylogenetic Group 4 set forth in FIG. 10A is used. Thus by way of specific example only, a TbpB C-lobe domain from a Neisseria meningitidis strains B16B6 (phylogenetic Group 1; FIG. 10A, black arrow), BZ169 (phylogenetic Group 2; FIG. 10A, black arrow), 53131 (phylogenetic Group 3; FIG. 10A, black arrow) and M982 (phylogenetic Group 4; FIG. 10A, black arrow) may be selected.

[0129] In further preferred embodiments, at least two C-lobe domains obtainable or obtained from a TbpB polypeptide are used, wherein one of the two C-lobe domains is obtainable or obtained from Neisseria meningitidis and the other of the C-lobes is obtainable or obtained from Neisseria gonorrhoeae. Referring to the phylogenetic tree set forth in FIG. 26B, in preferred embodiments, at least two C-lobe domains are used, wherein a first C-lobe domain is obtained from any one of the C-lobe domains selected from a Neisseria gonorrhoeae bacterial strain belonging to phylogenetic Group 3, set forth in FIG. 26B, and wherein the second C-lobe domain is obtained from any one of the C-lobe domains selected from a Neisseria meningitidis strain belonging to phylogenetic Group 1 or Group 2, set forth in FIG. 26B. More preferably, at least three C-lobe domains obtainable or obtained from a TbpB polypeptide are used, wherein two C-lobe domains are obtainable or obtained from Neisseria meningitidis and the other C-lobes is obtainable or obtained from Neisseria gonorrhoeae. Preferably a C-lobe domain is selected from a Neisseria gonorrhoeae bacterial strain belonging to phylogenetic Group 3, set forth in FIG. 26B, a the second C-lobe domain is obtained from any one of the C-lobe domains selected from a Neisseria meningitidis strain belonging to a phylogenetic Group 2, set forth in FIG. 26B, and the third C-lobe domain is obtained from any one of the C-lobe domains selected from a Neisseria meningitidis strain belonging to a phylogenetic Group 1, set forth in FIG. 26B. In further preferred embodiments, at least four C-lobe domains obtainable or obtained from a TbpB polypeptide are used, wherein three C-lobe domains are obtainable or obtained from Neisseria meningitidis and the other C-lobe domain is obtainable or obtained from Neisseria gonorrhoeae. Preferably a C-lobe domain is selected from a Neisseria gonorrhoeae bacterial strain belonging to phylogenetic Group 3, set forth in FIG. 26B, the second, and third, C-lobe domain are obtained from any of the C-lobe domains selected from a Neisseria meningitidis strain belonging to two different Subgroups of phylogenetic Group 2 (e.g. phylogenetic Subgroup 2.1 and phylogenetic Subgroup 2.2) set forth in FIG. 26B, and the fourth C-lobe domain is obtained from any one of the C-lobe domains selected from a Neisseria meningitidis strain belonging to a phylogenetic Group 1, set forth in FIG. 26B. In further preferred embodiments, at least four C-lobe domains obtainable or obtained from a TbpB polypeptide are used, wherein two C-lobe domains are obtainable or obtained from Neisseria meningitidis and the other two C-lobes is obtainable or obtained from Neisseria gonorrhoeae. Preferably the two C-lobe domains selected from a Neisseria gonorrhoeae bacterial strain belong to two different phylogenetic Subgroups of phylogenetic Group 3 (e.g. Subgroup 3.1 and Subgroup 3.2), set forth in FIG. 26B, the third and fourth C-lobe domains are obtained from a Neisseria meningitidis strain belonging to phylogenetic Group 1 and phylogenetic Group 2, respectively. In a further embodiment, at least five C-lobe domains obtainable or obtained from a TbpB polypeptide are used, wherein three C-lobe domains are obtainable or obtained from Neisseria meningitidis and the other two C-lobes is obtainable or obtained from Neisseria gonorrhoeae. Preferably the two C-lobe domains selected from a Neisseria gonorrhoeae bacterial strain belong to two different phylogenetic Subgroups of phylogenetic Group 3 (e.g. Subgroup 3.1 and Subgroup 3.2), set forth in FIG. 26B, the third and fourth C-lobe domains are obtained from a Neisseria meningitidis strain belonging to two different phylogenetic Subgroups of phylogenetic Group 2 (e.g. Subgroup 2.1 and Subgroup 2.2), set forth in FIG. 26B, and the fifth C-lobe domain belongs to a Neisseria meningitidis strain belonging to phylogenetic Group 1 set forth in FIG. 26B. In a yet further preferred embodiment, at least six C-lobe domains obtainable or obtained from a TbpB polypeptide are used. In this embodiment at least one C-lobe domain is obtained or obtainable from Neisseria meningitidis and at least one C-lobe domain is obtained or obtainable from Neisseria gonorrhoeae, the other C-lobes are obtained or obtainable from strains that are antigenically divergent in accordance with FIG. 26B. In preferred embodiments, three C-lobe domains are obtainable or obtained from Neisseria meningitidis and the other three C-lobes are obtainable or obtained from Neisseria gonorrhoeae. Referring to FIG. 26B preferably the three C-lobe domains obtained from the Neisseria gonorrhoeae strains belong to three antigenically divergent groups, and the three C-lobe domains obtained from Neisseria meningitidis belong to three antigenically divergent strains.

[0130] In further preferred embodiments, at least two C-lobe domains obtainable or obtained from a TbpB polypeptide are used, wherein one of the two C-lobe domains is obtainable or obtained from Neisseria meningitidis and the other of the C-lobes is obtainable or obtained from Neisseria gonorrhoeae. Referring to the phylogenetic tree set forth in FIG. 26A, in preferred embodiments, at least two C-lobe domains are used, wherein a first C-lobe domain is obtained from any one of the C-lobe domains selected from a Neisseria gonorrhoeae bacterial strain belonging to phylogenetic Group 3 or phylogenetic Group 1, set forth in FIG. 26A, and wherein the second C-lobe domain is obtained from any one of the C-lobe domains selected from a Neisseria meningitidis strain belonging to a phylogenetic Group 2, Group 4 or Group 5, set forth in FIG. 26A.

[0131] In further preferred embodiments, at least two C-lobe domains obtainable or obtained from a TbpB protein are used, wherein both of the two C-lobe domains are obtainable or obtained from Haemophilus influenzae. Referring to the phylogenetic tree set forth in FIG. 27A and FIG. 27B, in preferred embodiments, at least two C-lobe domains are used, wherein a first C-lobe domain is obtained from any one of the C-lobe domains selected from a Haemophilus influenzae bacterial strain belonging to phylogenetic Group 1, phylogenetic Group 2, or phylogenetic Group 3 set forth in FIG. 27A or FIG. 27B, and wherein the second C-lobe domain is obtained from any one of the Haemophilus influenzae strains belonging to a phylogenetic Group set forth in FIG. 27A or FIG. 27B other than the phylogenetic Group the first C-lobe domain is selected from. Thus by way of example only, a TbpB C-lobe domain obtained from Haemophilus influenzae strain H216 (phylogenetic Group 3; FIG. 27B, black arrow) may be combined with a TbpB C-lobe domain from strain H214 (phylogenetic Group 1; FIG. 27B, black arrow). In further preferred embodiments, at least three C-lobe domains are used wherein the C-lobe domains are selected from strains belonging to three different Groups set forth in FIG. 27A and FIG. 27B (i.e. a C-lobe domain selected from each phylogenetic Group 1, phylogenetic Group 2 and phylogenetic Group 3). Thus by way of specific example only, a TbpB C-lobe domain from a Haemophilus influenzae strains H216 (phylogenetic Group 3; FIG. 27B, black arrow), H214 (phylogenetic Group 1; FIG. 27B, black arrow), and H011 (phylogenetic Group 2; FIG. 27B, black arrow) may be selected.

[0132] In further preferred embodiments, at least two C-lobe domains obtainable or obtained from a TbpB protein are used, wherein both of the two C-lobe domains are obtainable or obtained from Mannheimia haemolytica. Referring to the phylogenetic tree set forth in FIG. 28, in preferred embodiments, at least two C-lobe domains are used, wherein a first C-lobe domain is obtained from any one of the C-lobe domains selected from a Mannheimia haemolytica bacterial strain belonging to phylogenetic Group 1, set forth in FIG. 28, and wherein the second C-lobe domain is obtained from any one of the Mannheimia haemolytica strains belonging to a phylogenetic Group 3.

[0133] In further preferred embodiments, at least two C-lobe domains obtainable or obtained from a TbpB polypeptide are used, wherein one of the two C-lobe domains is obtainable or obtained from Bibersteinia trehalosi and the other of the C-lobes is obtainable or obtained from Mannheimia haemolytica. Referring to FIG. 28, in preferred embodiments, at least two C-lobe domains are used, wherein a first C-lobe domain is obtained from any one of the C-lobe domains selected from a Bibersteinia trehalosi bacterial strain belonging to phylogenetic Group 2, set forth in FIG. 28, and wherein the second C-lobe domain is obtained from any one of the C-lobe domains selected from a Mannheimia haemolytica strain belonging to a phylogenetic Group 1, or Group 3, set forth in FIG. 28.

[0134] In further preferred embodiments, at least two C-lobe domains obtainable or obtained from a TbpB protein are used, wherein both of the two C-lobe domains are obtainable or obtained from Moraxella catharrhalis. Referring to the phylogenetic tree set forth in FIG. 29, in preferred embodiments, at least two C-lobe domains are used, wherein a first C-lobe domain is obtained from any one of the C-lobe domains selected from a Moraxella catharrhalis bacterial strain belonging to phylogenetic Group 1, phylogenetic Group 2, or phylogenetic Group 3 set forth in FIG. 29, and wherein the second C-lobe domain is obtained from any one of the Moraxella catharrhalis strains belonging to a phylogenetic Group set forth in FIG. 29 other than the phylogenetic Group the first C-lobe domain is selected from. Thus by way of example only, a TbpB C-lobe domain obtained from Moraxella catharrhalis strain AAC34279.1 (phylogenetic Group 3; FIG. 29, black arrow) may be combined with a TbpB C-lobe domain from strain AAD12263.1 (phylogenetic Group 1; FIG. 29, black arrow). In further preferred embodiments, at least three C-lobe domains are used wherein the C-lobe domains are selected from strains belonging to three different Groups set forth in FIG. 29 (i.e. a C-lobe domain selected from each phylogenetic Group 1, phylogenetic Group 2 and phylogenetic Group 3). Thus by way of specific example only, a TbpB C-lobe domain from a Moraxella catharrhalis strains AAC34279.1 (phylogenetic Group 3; FIG. 29, black arrow), AAD12263.1 (phylogenetic Group 1; FIG. 29, black arrow), and 003664398.1 (phylogenetic Group 2; FIG. 29, black arrow) may be selected.

[0135] In particularly preferred embodiments, the aforementioned mixtures of polypeptides comprising or consisting of C-lobe domains are C-lobe domains obtainable or obtained from TbpB polypeptides, including, without limitation the C-lobe domains set forth in SEQ.ID NO: 5; SEQ.ID NO: 6; SEQ.ID NO: 22; SEQ.ID NO: 33; SEQ.ID NO: 34; SEQ.ID NO: 119; SEQ.ID NO: 125; SEQ.ID NO: 179 to SEQ.ID NO: 195; and SEQ.ID NO: 213 to SEQ.ID NO: 218; SEQ.ID NO: 230; SEQ.ID NO: 232; and SEQ.ID NO: 234 to SEQ.ID NO: 278.

[0136] The foregoing mixtures of C-lobe domains may be prepared by mixing preparations comprising the individual C-lobe domains or by recombinantly producing fusion polypeptides comprising two or more C-lobe domains.

[0137] As hereinbefore mentioned, the immunogenic preparations of the present disclosure are preferably cross-reactive and/or cross-protective. While, as hereinbefore mentioned, formulations comprising single C-lobe domains may be cross-reactive and/or cross-protective, mixtures of C-lobe domains are particularly preferred, in that they may be used to prepare immunogenic formulations that substantially broaden cross-reactivity and/or cross-protection against a wider range of bacterial strains and/or species, and allow the preparation of vaccine formulations providing protection from infection or disease transmitted by a plurality of bacterial species or bacterial strains.

[0138] In accordance with other embodiments, a polypeptide comprising a C-lobe domain and/or an N-lobe domain of an HIBP surface receptor polypeptide is prepared in such a manner that a loop domain connecting two β-strands within the C-lobe domain or the N-lobe domain is modified and the polypeptide is unable to substantially bind host iron binding protein. The term “modified” as used herein in conjunction with a loop domain refers to a loop from which at least one amino acid residue has been removed or replaced. Thus the resultant loop within the C-lobe domain or the N-lobe domain may be truncated or, in other embodiments the amino acid residue, residues may be replaced with one or more alternate amino residues. FIG. 1 and FIG. 2 show the loop domains of exemplary HIBP surface receptor proteins. FIG. 8 and FIG. 14 provide examples of loop reductions in the N-lobe domain and C-lobe domain, respectively. In accordance herewith at least one of the loop domains connecting two β-strands within the C-lobe domain or the N-lobe domain of the HIBP binding membrane receptor protein is modified to remove at least one amino acid residue from the loop domains, the resulting polypeptide comprising a modified N-lobe domain or C-lobe domain and unable to substantially bind host iron binding protein. In other embodiments more amino acid residues are removed e.g. at least 5, 10, 15, 20, 25, 30, 35, 40, 45, 50, 60, 70, 80, 90, 100 amino acid residues are removed from the loop domain. In other embodiments the loop domain is removed in its entirety. Any of the loop domains may be selected to be modified in accordance with the present disclosure, provided such modification results in a polypeptide that is unable to substantially bind to the host iron binding protein. Thus, referring to the exemplary porcine TbpB polypeptide of FIG. 1, in embodiments of the present disclosure where one loop domain is modified, such loop domain may be selected to be any one of the loop domains L1-L32 (as exemplified by the Actinobacillus pleuropneumoniae loops L1-L32 polypeptide sequences: SEQ.ID: NO 42; SEQ.ID: NO 44; SEQ.ID: NO 46; SEQ.ID: NO 48; SEQ.ID: NO 50; SEQ.ID: NO 52; SEQ.ID: NO 54; SEQ.ID: NO 56; SEQ.ID: NO 58; SEQ.ID: NO 60; SEQ.ID: NO 62; SEQ.ID: NO 64; SEQ.ID: NO 66; SEQ.ID: NO 68; SEQ.ID: NO 70; SEQ.ID: NO 72; SEQ.ID: NO 74; SEQ.ID: NO 76; SEQ.ID: NO 78; SEQ.ID: NO 80; SEQ.ID: NO 82; SEQ.ID: NO 84; SEQ.ID: NO 86; SEQ.ID: NO 88; SEQ.ID: NO 90; SEQ.ID: NO 92; SEQ.ID: NO 94; SEQ.ID: NO 96; SEQ.ID: NO 98; SEQ.ID: NO 100; SEQ.ID: NO 102; SEQ.ID: NO 104; and SEQ.ID: NO 106, respectively, and encoded by the nucleic acid sequences SEQ.ID: NO 41; SEQ.ID: NO 43; SEQ.ID: NO 45; SEQ.ID: NO 47; SEQ.ID: NO 49; SEQ.ID: NO 51; SEQ.ID: NO 53; SEQ.ID: NO 55; SEQ.ID: NO 57; SEQ.ID: NO 59; SEQ.ID: NO 61; SEQ.ID: NO 63; SEQ.ID: NO 65; SEQ.ID: NO 67; SEQ.ID: NO 69; SEQ.ID: NO 71; SEQ.ID: NO 73; SEQ.ID: NO 75; SEQ.ID: NO 77; SEQ.ID: NO 79; SEQ.ID: NO 81; SEQ.ID: NO 83; SEQ.ID: NO 85; SEQ.ID: NO 87; SEQ.ID: NO 89; SEQ.ID: NO 91; SEQ.ID: NO 93; SEQ.ID: NO 95; SEQ.ID: NO 97; SEQ.ID: NO 99; SEQ.ID: NO 101; SEQ.ID: NO 103; and SEQ.ID: NO 105, respectively), as further set forth in Table 1. In embodiments of the disclosure wherein two loop domains are modified, such two loop domains may be any two loop domains selected from the loop domains L1-L32 domains (again referring to the exemplary TbpB polypeptide of FIG. 1), as further set forth in Table 2. In embodiments of the disclosure wherein three loop domains are modified, such three loop domains may be any three loop domains selected from the loop domains L1-L32 domains (again referring to the exemplary TbpB polypeptide of FIG. 1), as further set forth in Table 3. In embodiments of the disclosure wherein four loop domains are modified, such four loop domains may be any three loop domains selected from the combination of loops set forth in Table 3 plus one additional loop domain selected from the loop domains L1-L32 (again referring to the exemplary TbpB polypeptide of FIG. 1). In other embodiments a total of 5, 6, 7, 8, 9, 10, 11, 12, 13, 14, 15, 16, 17, 18, 19, 20, 21, 22, 23, 24, 25, 26, 27, 28, 29, 30, 31 or 32 loop domains may be modified. It will be clear to those of skill in the art that the exact number of modified loop domains may vary and may be selected to be any 5, 6, 7, 8, 9, 10, 11, 12, 13, 14, 15, 16, 17, 18, 19, 20, 21, 22, 23, 24, 25, 26, 27, 28, 29, 30, 31 or 32 loop domains selected from the loops L1-L32, in each of these embodiments of the present disclosure, in a manner similar to the selection of loop domains described with respect to the embodiments in which 2 or 3 loop domains have been modified. In particularly preferred embodiments, one or all of loops L18, L21, L23 and L27 (as exemplified by the Actinobacillus pleuropneumoniae SEQ.ID NO: 76; SEQ.ID NO: 82; SEQ.ID NO: 86; and SEQ.ID NO: 96, respectively) of the C-lobe domain are modified. In further particularly preferred embodiments, one or all of loop L 1, L5, L8 and L12 (as exemplified by the Actinobacillus pleuropneumoniae SEQ.ID NO: 42; SEQ.ID NO: 50; SEQ.ID NO: 56; SEQ.ID NO: 64, respectively) of the N-lobe domain are modified. Loop domains that may be modified are loop domains that connect two 3-strands assembled within a β-barrel or handle domain β-sheet of the C-lobe domain or N-terminal lobe domain, or loop domains that connect two assembled β-strands, or a combination of the foregoing. In order to truncate a loop domain within the C-lobe domain or the N-terminal lobe domain, the polypeptide may be prepared in such a manner that the loop domain is removed in its entirety, and optionally replaced with one or more linking amino acid, thus resulting in a more or less direct connection between two β-strands, or in such a manner that a portion or portions of a loop domain are removed. In accordance herewith preferably at least half of the amino acid residues from at least one of the loop domains of the C-lobe domain or the N-lobe domain is removed. In further preferred embodiments, at least one half of the total amino acid residues of the loop domain are removed. Thus in such embodiments where a loop domain comprises for example 40 amino residues, at least 20 amino acid residues of the loop domain will be removed. In further embodiments, the loop domain is modified in such a manner that at least 60%, 70%, 80% or 90% of the amino acid residues of the loop domain are removed. In other embodiments up to 1, 2, 3, 4, 5, 6, 7, 8, 9, or 10 amino acids of the loop domains are retained, following truncation, and in yet other embodiments up to 10%, 20%, 30%, 40%, 50%, 60%, 70%, 80% or 90% of the loop domains are retained following truncation. In embodiments where the loop domain is modified in such a manner that only a portion of the loop domain is removed, the removed amino acid residues may be located at the N-terminal end of the loop domain, at the C-terminal end of the loop domain or in between the N- and C-termini. In embodiments were a plurality of loop domains of the C-lobe domain or the N-lobe domain are modified, such loop reductions may involve the removal of an identical number of amino acid residues from each loop, for example 10 amino acid residues from each loop within the C-lobe domain or the N-lobe domain may be removed, or the loop reduction may involve the removal of different amounts of amino acid residues from each loop, for example 10 residues in one loop and 20 residues in another loop.

[0139] In further preferred embodiments, amino acid residues within the loop domains of the C-lobe domain and/or N-lobe domain are replaced by others e.g. by site directed mutagenesis, the resulting polypeptide comprising a modified C-lobe domain or N-lobe domain and unable to substantially bind host iron binding protein. FIG. 22 provides examples of residue replacements in N-lobe domain loop regions of various TbpB polypeptides and FIG. 23 illustrates the reduction in Tf binding due to these residue replacements. Thus, for example, one or more amino acid residues may be replaced in any one of loops L1-L32. In certain preferred embodiments, one or more amino acid residues are replaced in loop domain L1, L3, L5 or L8 of the N-lobe domain (as exemplified by the Actinobacillus pleuropneumoniae SEQ.ID NO: 42; SEQ.ID NO: 46; SEQ.ID NO: 50; and SEQ.ID NO: 56, respectively). In preferred embodiments, an aromatic amino acid (phenylalanine, tyrosine, and tryptophan) within loop domain L8 is replaced with an aliphatic amino acid (glycine, valine, leucine, isoleucine). These are surface accessible aromatic amino acid residues in an otherwise generally cationic surface region. In particularly preferred embodiments, an Haemophilus parasuis TbpB polypeptide is selected and one or more of the following mutations is made in the TbpB polypeptide to obtain a modified TbpB polypeptide: Y93A (SEQ.ID NO: 170; SEQ.ID NO: 171); Y117A (SEQ.ID NO: 172; SEQ.ID NO: 173); Y167A (SEQ.ID.NO: 174; SEQ.ID NO: 175;) or W176A (SEQ.ID NO: 176; SEQ.ID NO: 177), and in further preferred embodiments an Actinobacillus pleuropneumoniae TbpB polypeptide is selected and one or more of the following mutations is made in the polypeptide to obtain a modified TbpB polypeptide: F171A (SEQ.ID NO: 3; SEQ.ID NO: 4); Y95A (SEQ.ID NO: 13; SEQ.ID NO: 14); Y121A (SEQ.ID NO: 15; SEQ.ID NO: 16); Y174A (SEQ.ID NO: 17; SEQ.ID NO: 18); or R179E (SEQ.ID NO: 19; SEQ.ID NO: 20), and in further preferred embodiments an Actinobacillus suis TbpB polypeptide is selected and one or more of the following mutations is made in the polypeptide to obtain a modified TbpB polypeptide: F63A (SEQ.ID NO: 29; SEQ.ID NO: 30) or F152A (SEQ.ID NO: 31; SEQ.ID NO: 32) The present disclosure includes each of the aforementioned modified polypeptides and nucleic acid sequences encoding these polypeptides, as well as immunogenic compositions and vaccine compositions comprising these polypeptides.

[0140] The reductions in size of one or more loop domains, or modification of amino acids in the loop domain of the HIBP polypeptides in accordance with the present disclosure are preferably made in such a manner that the resultant polypeptide is conformationally stable. By the term “conformationally stable” it is meant that the conformational state or conformation of the polypeptide remains substantially the same following the modification in size of the loop or replacement of amino acid residue. The conformational state of the loop domain which is modified may be more or less altered. The determinants of conformational state or confirmation of a polypeptide include: the polypeptide's primary structure as reflected in its amino acid sequence, the polypeptide's secondary structure (e.g. α-helix, β-sheet and the like), the polypeptide's tertiary structure (i.e. the three dimensional folding of the polypeptide chain) and the quaternary structure (i.e. the interaction of the polypeptide with other protein subunits). Protein conformation can further be influenced by environmental factors, such as pH, osmolarity, ionic strength and salt concentration. The design of loop reduction may be informed by the alignment and comparison of multiple heterologous sequences, the comparison of three-dimensional conformational structures of multiple heterologous polypeptides known to the art, and the use of conservative amino acid substitutions (e.g. combinations such as gly, ala; val, ile; leu, met; asp, glu; asn, gin; ser, thr; lys, arg; cys, met; and phe, trp, tyr). Furthermore, the conformational state of a protein may be assayed by a functional assay (e.g. binding of a host iron binding protein), or by physical methods such as X-ray crystallography or Nuclear Magnetic Resonance (NMR).

[0141] In further embodiments, at least one loop domain of the C-lobe domain or the N-lobe domain of an HIBP-surface receptor protein comprising the longest loop, is selected to be modified. In embodiments, wherein such a loop is modified in its entirety this generally will involve the removal of at least 25 amino acid residues and may result in the removal of 150 amino acid residues or more.

[0142] In preferred embodiments, at least one loop domain of the C-lobe domain or the N-lobe domain of an HIBP-surface receptor protein comprising the longest loop (i.e. comprising the most amino acid residues) of the C-lobe domain or the N-lobe domain is modified. In a further preferred embodiment, at least one loop domain of the C-lobe domain or the N-lobe domain of an HIBP-surface receptor protein comprising the longest loop of the C-lobe domain or the N-lobe domain is modified, and a second loop domain of the C-lobe domain or the N-lobe domain of an HIBP-surface receptor protein comprising the second longest loop are selected to be modified. In further preferred embodiments, at least one loop domain of the C-lobe domain or the N-lobe domain of an HIBP-surface receptor protein comprising the longest loop, and a second loop domain of the C-lobe domain or the N-lobe domain of an HIBP-surface receptor protein comprising the second longest loop are selected to be modified and a third loop domain of the C-lobe domain or the N-lobe domain of an HIBP-surface receptor protein comprising the third longest loop are selected to be modified. In yet further preferred embodiments, at least one loop domain of the C-lobe domain or the N-lobe domain of an HIBP-surface receptor protein comprising the longest loop, and a second loop domain of the C-lobe domain or the N-lobe domain of an HIBP-surface receptor protein comprising the second longest loop are selected to be modified and a third loop domain of the C-lobe domain or the N-lobe domain of an HIBP-surface receptor protein comprising the third longest loop are selected to be modified, and a fourth loop domain of the C-lobe domain or the N-lobe domain of an HIBP-surface receptor protein comprising the fourth longest loop are selected to be modified. The aforementioned embodiments are further detailed in Examples 3 and 4 hereto.

[0143] Surprisingly, in accordance herewith, it has been found that a polypeptide substantially consisting of a C-lobe domain or an N-lobe domain of a HIBP surface receptor protein can readily be produced, for example in a microbial production system, when one or more loop domains are modified, and the modified polypeptide is substantially conformationally stable.

[0144] In accordance herewith, the modified C-lobe domain or the N-lobe domain polypeptide may be used per se as an immunogen, or the polypeptide may be modulated to comprise further modifications. Modifications to the modified C-lobe domain or N-lobe domain of the polypeptide that may be made in accordance herewith include the preparation of N-terminal or C-terminal polypeptide extensions of the native or the modified C-lobe domain or N-lobe domain polypeptide. Such N-terminal and C-terminal polypeptide extensions include the addition of a second full length C-lobe domain polypeptide to the C-lobe domain, thus providing a C-lobe domain dimer, the addition of a second full length N-lobe domain polypeptide to the N-lobe domain, thus providing an N-lobe domain dimer, or an addition comprising a portion of a C-lobe domain polypeptide or a portion of an N-lobe domain polypeptide. Multimers may be assembled using the same monomeric polypeptide (i.e. homodimers, homotrimers etc.), or they may be assembled using different polypeptides, e.g. a C-lobe domain or an N-lobe domain obtained from different variants (i.e heterodimers, heterotrimers etc.). In preferred embodiments, heteromultimeric proteins representing different pathogens or pathogenic strains are assembled. Thus in one preferred embodiment, a heteromultimeric polypeptide comprising C-lobe domains or N-lobe domains selected from the group consisting of Actinobacillus pleuropneumoniae, Actinobacillus suis and Haemophilus parasuis C-lobe domains or N-lobe domains is prepared. In particularly preferred embodiments, the C-lobe domains or N-lobe domains are selected from the group consisting of A. pleuropneumoniae H49, A. suis H57 and A. pleuropneumoniae H87 C-lobe domains or N-lobe domains. In a further preferred embodiment, a heteromultimeric polypeptide comprising C-lobe domains selected from at least two TbpB C-lobe domains or N-lobe domains selected from strains of Neisseria meningitidis is prepared. In particularly preferred embodiments, the strains are selected from N. meningitidis M982 or N. meningitidis B16B6. Heteromultimeric proteins may convey immunogenicity to different pathogens. In further preferred embodiments the present disclosure provides, (i) a first polypeptide, comprising an N-lobe domain or a C-lobe domain of an HIBP surface receptor protein obtainable from or obtained from a Gram-negative pathogenic bacterial species, wherein the N-lobe domain or the C-lobe domain comprise a plurality of β-strands connected by a plurality of loop domains, and wherein at least one loop domain of the plurality of loop domains of the N-lobe domain or the C-lobe domain has been modified, linked to (ii) a second polypeptide comprising an HIBP surface receptor protein, or a portion thereof, obtainable from a Gram-negative bacterial species. In preferred embodiments, the portion of the HIBP surface receptor protein is an N-lobe domain or a C-lobe domain. In further preferred embodiments, the portion of the HIBP surface protein is an N-lobe domain or a C-lobe domain of an HIBP surface receptor protein obtainable from or obtained from a Gram-negative pathogenic bacterial species, wherein the N-lobe domain or the C-lobe domain comprise a plurality of β-strands connected by a plurality of loop domains, and wherein at least one loop domain of the plurality of loop domains of the N-lobe domain or the C-lobe domain has been modified.

[0145] In further embodiments, a multimeric polypeptide is prepared, such multimeric protein comprising a plurality of N- and C-terminal extensions, including the addition of a second, third, fourth, fifth, sixth or seventh full length C-lobe domain polypeptide to the C-lobe domain, thus providing a C-lobe domain multimer, or the addition of a second, third, fourth, fifth, sixth or seventh, full length N-lobe domain polypeptide to the N-lobe domain, thus providing an N-lobe domain dimer, or an addition comprising a portion of a C-lobe domain polypeptide or a portion of an N-lobe domain polypeptide. Thus for example, in one embodiment, the C-lobe domains are at least two, or at least three, C-lobe domains obtainable from a TbpB polypeptide obtainable from A. pleuropneumoniae, A. suis and Haemophilus parasuis. In accordance with such embodiment, the nucleic acid sequences encoding the TbpB C-lobe domains from A. pleuropneumoniae H49 (SEQ.ID NO: 5), A. suis H57 (SEQ.ID NO: 33) and A. pleuropneumoniae H87 (SEQ.ID NO: 21) may be linked to form a chimeric nucleic acid sequence (SEQ.ID NO: 39) encoding a single polypeptide (SEQ.ID NO: 40) encompassing the three C-lobes (SEQ.ID NO: 6; SEQ.ID NO: 34; SEQ.ID NO: 22). Accordingly, in yet further embodiments, the present disclosure provides (i) a first polypeptide, comprising an N-lobe domain or a C-lobe domain of an HIBP surface receptor protein obtainable from or obtained from a Gram-negative pathogenic bacterial species, wherein the N-lobe domain or the C-lobe domain comprise a plurality of β-strands connected by a plurality of loop domains, and wherein at least one loop domain of the plurality of loop domains of the N-lobe domain or the C-lobe domain has been modified, linked to (ii) a plurality of polypeptides each polypeptide comprising an HIBP surface receptor protein, or a portion thereof, obtainable from a Gram-negative bacterial species. In preferred embodiments the portion of the HIBP surface receptor protein is an N-lobe domain or a C-lobe domain. In further preferred embodiments, the portion of the HIBP surface protein is an N-lobe domain or a C-lobe domain of an HIBP surface receptor protein obtainable from or obtained from a Gram-negative pathogenic bacterial species, wherein the N-lobe domain or the C-lobe domain comprise a plurality of β-strands connected by a plurality of loop domains, and wherein at least one loop domain of the plurality of loop domains of the N-lobe domain or the C-lobe domain has been modified.

[0146] In further embodiments, upon removal of one or more amino acids from one or more loop domains of the C-lobe or N-lobe of an HIBP surface receptor protein, these residues are replaced with one or more alternate amino acid residues. In one embodiment, the alternate amino acid residues comprise a heterologous polypeptide antigenic determinant capable of eliciting an immune response in a vertebrate host organism. In further embodiments the alternate amino acid residues comprise two or more heterologous polypeptide antigenic determinants capable of eliciting an immune response in a vertebrate host organism. The heterologous antigenic determinants may be immuno-cross-reactive to the same or a different pathogenic organism. Thus it will be clear that the modified C-lobe domain or N-lobe domain of an HIBP surface receptor protein in accordance herewith may be used as a scaffold to produce and present one or more antigenic determinants. In a preferred embodiment, one or more loop regions of the C-lobe domain or the N-lobe domain of TbpB is replaced with one or more polypeptide portions obtainable from or obtained from an IOM protein, including a transferrin binding protein (“TbpA”) or lactoferrin binding protein A (“LbpA”). LbpA and TbpA polypeptides that may be used in accordance herewith include those set forth in SEQ.ID NO: 162 and SEQ.ID NO: 152. Portions of LbpA and TbpA polypeptides that may be used in accordance herewith include those set forth in SEQ.ID NO: 286 and SEQ.ID NO: 287. These fragments may be used to construct chimeric nucleic acid sequences and polypeptides, including those set forth in SEQ.ID. NO: 163; SEQ.ID. NO: 164; SEQ.ID. NO: 165; SEQ.ID. NO: 166, SEQ.ID. NO: 167; and SEQ.ID. NO: 168. This embodiment of the disclosure is further detailed in Examples 7 and 8. hereto. In a further preferred embodiment, one or more loop domains of the C-lobe or N-lobe of TbpB is replaced with a lysine rich polypeptide sequence, as further described in Example 9.

[0147] In all of the hereinbefore described embodiments which comprise an HIBP surface receptor polypeptide comprising a N-lobe domain, it is preferable that, the N-lobe domain is modified in such a manner that the N-terminal anchor polypeptide, or a substantial portion thereof, is removed from the N-lobe domain. The length of the anchor polypeptide may vary depending on the HIBP surface receptor polypeptide, but typically ranges from 40 to 75 amino acids in length, and located at the N-terminal end of the mature HIPB polypeptide. Thus referring to FIG. 1, the anchor polypeptide of the therein depicted mature TbpB polypeptide is 43 amino acids in length. Accordingly, in preferred embodiments hereof comprising a HIBP polypeptide comprising an N-lobe domain, the anchor polypeptide is reduced in length by at least 10 amino acid residues, preferably at least 15, 20, 25, 30, 35, 40, 45, 50, 55, 60, 65, 70 or 75 residues. In embodiments where a portion of the anchor polypeptide is selected for reduction in length, preferably a contiguous portion of the N-terminus of the anchor polypeptide, e.g. the 10 terminal amino acid residues of the anchor peptide, are removed, however other portions of the anchor polypeptide may also removed. In further preferred embodiments, the TbpB polypeptide from which the anchoring peptide has been truncated includes SEQ.ID NO: 279 to SEQ.ID NO: 283. The inventors of the present disclosure have found that the foregoing embodiments are particularly desirable, since the removal of the anchor polypeptide reduces aggregation of the modified HIBP surface receptor polypeptide, rendering the polypeptide easier to produce, without however substantially impacting the immunogenic properties of the polypeptide. Thus this modification of an HIBP polypeptide may be used in conjunction with any of the modified peptides that are substantially unable to substantially bind host iron binding protein set forth herein, including the herein described HIBP polypeptides comprising a N-lobe domain or C-lobe domain comprising a modified loop domain, and HIBP polypeptides comprising a N-lobe or C-lobe domain where a single amino acid has been replaced in a such a manner that the HIBP polypeptide is substantially unable to bind host iron bing protein.

[0148] As hereinbefore mentioned, in accordance with the present disclosure the HIBP surface receptor protein is modified in such a manner that it is unable to substantially bind host iron binding protein. The binding of host iron binding protein to the modified HIBP surface receptor protein may be evaluated using any chemical or biochemical assay capable of evaluating such binding including, for example, a solid phase binding assay, an affinity capture assay, or a biophysical assay. General methodologies to conduct these assays are known to those of skilled in the art and described in for example (12, 23-25, 50, 51). By conducting these assays the difference in binding characteristics between the native HIBP surface receptor protein and the native host iron binding protein, and the modified HIBP surface receptor protein and the native host iron binding protein, may readily be determined, and a series of modified HIBP surface receptor proteins may be evaluated in order to determine whether they are able to bind host iron binding protein. Different binding characteristics may be determined, including the binding constant (Kd). As hereinbefore mentioned, the Kd characterizing the binding between the host iron binding protein and the modified HIBP surface receptor proteins of the present disclosure is at least 2× higher than the Kd characterizing the binding between the host iron binding protein and the native HIBP surface receptor protein. One exemplary assay method to determine the binding constant using host transferrin is further described in Example 11 hereto.

[0149] The present disclosure further includes a method of identifying a modified HIBP surface receptor protein, the method comprising:
[0150] (i) providing a modified HIBP surface receptor protein and a native HIBP surface receptor protein;
[0151] (ii) determining the binding characteristics between the modified HIBP surface receptor protein and a host iron binding protein to obtain the binding characteristics of the modified HIBP surface receptor proteins;
[0152] (iii) determining the binding characteristics between the native HIBP surface receptor protein and a host iron binding protein to obtain the native HIBP surface receptor protein binding characteristics;
[0153] (iv) comparing the binding characteristics of the modified HIBP surface receptor protein characteristics with the native HIBP surface receptor protein characteristics; and
[0154] (v) identifying an HIBP surface receptor protein exhibiting binding characteristics that are substantially modulated relative to the binding characteristics of the native HIBP surface receptor protein.

[0155] “Substantially modulated” as used herein means that the binding interaction forces between the modified HIBP surface receptor proteins and the host iron binding protein are substantially weaker than the binding interaction forces between the native HIBP surface receptor proteins and the host iron binding protein. In preferred embodiments, the binding characteristic that used is the Kd relating to the binding interaction of the HIBP surface receptor protein and the host iron binding protein, wherein the value of the Kd of the binding interaction between the modified HIBP surface receptor proteins and the host iron binding protein is at least 2× larger in value than the Kd of the binding interaction between the native HIBP surface receptor proteins and the host iron binding protein. It is further noted that foregoing method may be used to screen a plurality of different candidate HIBP surface receptor proteins, simultaneously or sequentially, and identifying among the screened candidate HIBP surface receptor proteins, those exhibiting a more or less pronounced modulation in binding characteristics relative to the native HIBP surface receptor proteins.

[0156] The present disclosure further includes a method of preparing a modified HIBP surface receptor protein for use as a vaccine, the method comprising:
[0157] (i) providing a modified HIBP surface receptor protein and a native HIBP surface receptor protein;
[0158] (ii) determining the binding characteristics between the modified HIBP surface receptor protein and a host iron binding protein to obtain the modified HIBP surface receptor proteins' binding characteristics;
[0159] (iii) determining the binding characteristics between the native HIBP surface receptor protein and a host iron binding protein to obtain the native HIBP surface receptor protein binding characteristics;
[0160] (iv) comparing the binding characteristics of the modified HIBP surface receptor protein with the binding characteristics of the native HIBP surface receptor protein;
[0161] (v) identifying an HIBP surface receptor protein exhibiting binding characteristics that are substantially modulated relative to the binding characteristics of the native HIBP surface receptor protein; and
[0162] (vi) preparing the modified HIBP surface receptor protein exhibiting binding characteristics that are substantially modulated relative to the binding characteristics of the native HIBP surface receptor protein for use as a vaccine.

[0163] In accordance with the foregoing, the identified HIBP surface receptor protein exhibiting substantially modulated binding characteristics relative to the binding characteristics of the native HIBP surface receptor proteins may be used to prepare immunogenic formulations, e.g. by recombinantly producing the HIBP surface receptor protein, isolating the HIBP surface protein, and preparing a vaccine formulation comprising the HIBP surface receptor protein.

[0164] In further embodiments, the present disclosure comprises methods of evaluating cross-reactivity of antisera against surface receptor protein variants. Accordingly the present disclosure further comprises a method of evaluating the cross-reactivity of antisera against surface receptor protein variants, the method comprising:
[0165] (i) providing a plurality of nucleic acid sequences encoding surface receptor proteins;
[0166] (ii) determining the nucleic acid sequence variation among the plurality of surface receptor proteins;
[0167] (iii) selecting a variant portion of a surface receptor protein;
[0168] (iv) linking a nucleic acid sequence encoding an N-terminal or C-terminal portion of the variant surface receptor protein to a nucleic acid sequence encoding a peptide susceptible to enzymatic biotinylation and a nucleic acid sequence capable of controlling expression in a host cell to form a chimeric nucleic acid sequence;
[0169] (v) introducing the chimeric nucleic acid sequence into host cell and expressing the chimeric nucleic acid sequence to produce a fusion polypeptide comprising the N-terminal or C-terminal portion of the variant surface receptor protein fused to the peptide susceptible to biotinylation;
[0170] (vi) preparing cellular lysates from the host cells;
[0171] (vii) applying the cellular extracts to a streptavidin coated immunoassay substrate material; and
[0172] (viii) applying an antiserum to the immunoassay substrate material, washing the immunoassay substrate material and applying labeled second conjugates in order to evaluate the cross-reactivity between the antiserum and the variant portion of the surface receptor protein.

[0173] The nucleic acid sequence encoding the peptide susceptible to biotinylation additionally may comprise a nucleic acid sequence of sufficient length to permit, upon expression, a polypeptide extension for the fusion polypeptide such that the surface receptor protein is distant from the immunoassay substrate material and thereby fully accessible to binding of an antibody. The streptavidin coated immunoassay substrate material may be any substrate material, including, for example, an ELISA plate.

[0174] In further embodiments, the present disclosure comprises methods of evaluating the cross-reactive or protective properties of antiserum surface receptor protein variants, the method comprising:
[0175] (i) providing a plurality of nucleic acid sequences encoding surface receptor proteins;
[0176] (ii) determining the nucleic acid sequence variation among the plurality of surface receptor proteins;
[0177] (iii) providing a host cell comprising a counter-selectable marker capable of replacing a nucleic acid sequence encoding a surface receptor protein;
[0178] (iv) PCR amplifying a plurality of variant portions of one or more nucleic acid sequences encoding a surface receptor protein to obtain a plurality of PCR products encoding surface receptor variants, wherein PCR amplification is conducted in a manner that permits integration of the PCR products into the host cell comprising a counter-selectable marker, and wherein the PCR products comprise a unique extraneous nucleic acid sequence in order permit identification of each PCR product;
[0179] (v) introducing and expressing the plurality of PCR products into the host cell comprising the counter-selectable marker to provide a library of antigenic HIBP variants; and
[0180] (vi) using all or a portion of the library in an in-vivo or in-vitro immunological assay to assess the cross-reactive or cross-protective properties of the library or portion thereof.

[0181] The in-vivo or in-vitro immune assay may be any assay including any ELISA assay, functional immunological assay or animal infection model.

[0182] In yet further embodiments, the present disclosure comprises a method of evaluating the efficacy of a vaccine for the prevention of colonization of the mammalian upper respiratory tract by a Gram-negative bacterial strain expressing a surface receptor protein variant, the method comprising:
[0183] (i) providing (a) a transgenic mouse line expressing a mammalian CEACAM receptor from the host species of the pathogen to which the vaccine is directed and (b) a mouse line genetically identical to the transgenic mouse line but not expressing the CEACAM receptor;
[0184] (ii) demonstrating that the Gram-negative bacterial strain expressing the variant surface receptor protein is capable of colonizing the upper respiratory tract of the transgenic mouse line, and is not capable of colonizing the upper respiratory tract of the mouse line not expressing the CEACAM receptor;
[0185] (iii) determining whether immunizing with antigens derived from the surface receptor protein result in the absence of colonization of the upper respiratory tract in transgenic mice infected with the Gram-negative bacterial strain expressing the surface receptor protein variant;
[0186] (iv) determining whether provision of antisera from animals immunized with antigens derived from the surface receptor protein result in the absence of colonization of the upper respiratory tract in non-transgenic immunized mice infected with the Gram-negative bacterial strain expressing the surface receptor protein variant
[0187] (v) preparing a library comprising portions of surface receptor protein from the Gram-negative bacterial strain and use the library in an animal upper respiratory tract colonization model to evaluate colonization of the upper respiratory tract of animals challenged with the surface receptor variants; and
[0188] (vi) optionally, extracting and preparing DNA obtained from the library used to challenge the animal and/or from samples obtained from the challenged animals at appropriate time periods after exposure, and determine the proportion of strains expressing different receptor variants.

[0189] In general, it will be understood by a person of ordinary skill in the art, having read the current disclosure, that in accordance with the disclosure a series of different modulated polypeptides may be prepared and obtained, all of which, are modified HIBP surface receptor proteins, wherein the modification is made in such a manner that the modified HIBP surface receptor protein is unable to substantially bind host iron binding protein. These modulated polypeptides and methods of making such modulated polypeptides are all intended to be included within the scope of the compositions and methods herein provided.

[0190] The modified C-lobe domain or N-lobe domain polypeptides are conveniently prepared by providing a nucleic acid sequence encoding an HIBP surface receptor protein, and modulating the native nucleic acid sequence in such a manner that the polypeptides comprising the modified C-lobe domain or N-lobe domain are expressed in a recombinant host organism, for example a microbial cell. Modulations to the nucleic acid sequence may be made using a variety of nucleic acid modification techniques that will be generally known to those skilled in the art, including for example site directed mutagenesis, targeted mutagenesis, random mutagenesis, the addition of organic solvents, gene shuffling or a combination of these and other techniques known to those of skill in the art, each methodology designed to target the loop domains of the C-lobe domain or N-lobe domain in such a manner that a loop domain therein is modified. Alternatively the modulated nucleic acid sequences encoding the modified in size-C-lobe domain or N-lobe domain polypeptides may be prepared ab initio using gene synthesis techniques. General techniques to prepare and modify nucleic acid sequences are readily available to the skilled artisan, for example in Green and Sambrook, Molecular Cloning, a Laboratory Manual, Cold Spring Harbor Laboratory Press, 2012, (33).

[0191] In other embodiments of the present disclosure, methods for preparing an immunogenic composition are provided. Accordingly, the present disclosure provides a method for preparing an immunogenic composition comprising:
[0192] (a) providing a chimeric nucleic acid sequence comprising as operably linked components:
   [0193] (i) a nucleic acid sequence encoding a polypeptide comprising a C-lobe domain or N-lobe domain of an HIBP surface receptor protein obtainable from a Gram-negative bacterial species wherein the polypeptide has been modified in such a manner that it is unable to substantially bind host iron binding protein; and
   [0194] (ii) a nucleic acid sequence capable of controlling expression in a recombinant host cell;
[0195] (b) introducing the chimeric nucleic acid sequence into a host cell and growing the host cell to produce the polypeptide comprising the C-lobe domain or N-lobe domain;
[0196] (c) recovering the polypeptide comprising C-lobe domain or N-lobe domain from the host cell; and
[0197] (d) preparing an immunogenic composition

[0198] In certain embodiments the C-lobe domain or N-lobe domain comprises a plurality of β-strands connected by a plurality of loop domains, and wherein at least one loop domain of the plurality of loop domains has been modified, and wherein the polypeptide has been modified in such a manner that it is unable to substantially bind host iron binding protein.

[0199] In further preferred embodiments the present disclosure provides a method for preparing an immunogenic composition comprising:
[0200] (a) providing a chimeric nucleic acid sequence comprising as operably linked components:
   [0201] (i) a first nucleic acid sequence encoding a polypeptide comprising a first C-lobe domain or first N-lobe domain of an HIBP surface receptor protein obtainable from a Gram-negative bacterial species;
   [0202] (ii) a second nucleic acid sequence encoding a polypeptide comprising a second C-lobe domain or second N-lobe domain of an HIBP surface receptor protein obtainable from a Gram-negative bacterial species; and
   [0203] (iii) a nucleic acid sequence capable of controlling expression in a recombinant host cell;
[0204] (b) introducing the chimeric nucleic acid sequence into a host cell and growing the host cell to produce the polypeptide comprising the first and second C-lobe domain or first and second N-lobe domain;
[0205] (c) recovering the polypeptide comprising the first and second C-lobe domain or first and second N-lobe domain from the host cell; and
[0206] (d) preparing an immunogenic composition.

[0207] In preferred embodiments, the first and second nucleic acids are operably linked in such a manner that a heteromultimeric fusion polypeptide comprising a first and second C-lobe domain or a first and second N-lobe domain are produced, and wherein the heteromultimeric fusion polypeptide is unable to substantially bind host iron binding protein.

[0208] In accordance herewith, the nucleic acid sequence encoding the HIBP surface receptor protein is linked to a nucleic acid sequence capable of controlling expression of the HIBP surface receptor protein in a host cell. Accordingly, the present disclosure also provides a nucleic acid sequence encoding the HIBP surface receptor protein linked to a promoter capable of controlling expression in a host cell. Nucleic acid sequences capable of controlling expression in host cells that may be used herein include any transcriptional promoter capable of controlling expression of polypeptides in host cells. Generally, promoters obtained from bacterial cells are used when a bacterial host is selected in accordance herewith, while a fungal promoter will be used when a fungal host is selected, a plant promoter will be used when a plant cell is selected, and so on. Further nucleic acid elements capable of controlling expression in a host cell include transcriptional terminators, enhancers and the like, all of which may be included in the chimeric nucleic acid sequences of the present disclosure.

[0209] In accordance with the present disclosure, the chimeric nucleic acid sequences comprising a promoter capable of controlling expression in a host cell linked to a nucleic acid sequence encoding a polypeptide comprising a C-lobe domain or N-lobe domain of an HIBP surface receptor protein obtainable from a Gram-negative bacterial species, wherein the C-lobe domain or N-lobe domain comprises a plurality of β-strands connected by a plurality of loop domains, and wherein at least one loop domain of the plurality of loop domains has been modified, can be integrated into a recombinant expression vector which ensures good expression in the host cell. Accordingly, the present disclosure includes a recombinant expression vector comprising as operably linked components:
[0210] (i) a nucleic acid sequence capable of controlling expression in a host cell; and
[0211] (ii) a nucleic acid sequence encoding a polypeptide comprising a C-lobe domain or N-lobe domain of an HIBP surface receptor protein obtainable from or obtained from a Gram-negative bacterial species, wherein the polypeptide has been modified in such a manner that it is unable to substantially bind host iron binding protein.
   wherein the expression vector is suitable for expression in a host cell. The term “suitable for expression in a host cell” means that the recombinant expression vector comprises the chimeric nucleic acid sequence of the present disclosure linked to genetic elements required to achieve expression in a host cell. Genetic elements that may be included in the expression vector in this regard include a transcriptional termination region, one or more nucleic acid sequences encoding marker genes, one or more origins of replication and the like. The genetic elements are operably linked, typically as well be known to those of skill in the art, by linking e.g. a promoter in the 5′ to 3′ direction of transcription to a coding sequence. In preferred embodiments, the expression vector further comprises genetic elements required for the integration of the vector or a portion thereof in the host cell's genome. In further embodiments the C-lobe domain or N-lobe domain comprises a plurality of β-strands connected by a plurality of loop domains, and wherein at least one loop domain of the plurality of loop domains has been modified.

[0212] Pursuant to the present disclosure, the expression vector may further contain a marker gene. Marker genes that may be used in accordance with the present disclosure include all genes that allow the distinction of transformed cells from non-transformed cells, including all selectable and screenable marker genes. A marker gene may be a resistance marker such as an antibiotic resistance marker against, for example, kanamycin or ampicillin. Screenable markers that may be employed to identify transformants through visual inspection include, galactosidase, β-glucuronidase (GUS) (U.S. Pat. Nos. 5,268,463 and 5,599,670) and green fluorescent protein (GFP) (52).

[0213] One host cell that particularly conveniently may be used is Escherichia coli. The preparation of the E. coli vectors may be accomplished using commonly known techniques such as restriction digestion, ligation, ligation independent cloning, gel electrophoresis, DNA sequencing, the Polymerase Chain Reaction (PCR), and other methodologies. A wide variety of cloning vectors are available to perform the necessary steps required to prepare a recombinant expression vector including custom vectors that the inventors have developed. Among the vectors with a replication system functional in E. coli, are vectors such as the pUC or pET series of vectors, etc. Typically, these cloning vectors contain a marker allowing selection of transformed cells. Nucleic acid sequences may be introduced in these vectors, and the vectors may be introduced in E. coli by preparing competent cells, electroporation or using other well known methodologies to a person of skill in the art. E. coli may be grown in an appropriate medium, such as Luria-Broth medium and harvested. Recombinant expression vectors may readily be recovered from cells upon harvesting and lysing of the cells. Further, general guidance with respect to the preparation of recombinant vectors and growth of recombinant organisms may be found in, for example: Sambrook et al., Molecular Cloning, a Laboratory Manual, Cold Spring Harbor Laboratory Press, 2001, Third Ed (33).

[0214] The production of the recombinant proteins can occur throughout the growth of the E. coli strain, preferably by induction of expression after a period of growth to achieve a significant biomass. This will result in the production of the polypeptide comprising the C-lobe domain or N-lobe domain or the C-lobe domain or N-lobe domain with modified loops. The polypeptide subsequently may be recovered, isolated and separated from other host cell components by a variety of different protein purification techniques including, e.g. metal-chelate chromatography, ion-exchange chromatography, size exclusion chromatography, affinity chromatography, hydrophobic interaction chromatography, reverse phase chromatography, gel filtration, etc. Further general guidance with respect to protein purification may for example be found in: Protein Purification: Principles, High Resolution Methods, and Applications (53). The term “recovered” as used herein means that the polypeptides is obtained in more or less pure form. In preferred embodiments, a substantially immunogenic polypeptide comprising a C-lobe domain of an HIBP surface receptor protein obtainable from a Gram-negative bacterial species, wherein the C-lobe domain or N-lobe domain comprises a plurality of β-strands connected by a plurality of loop domains, and wherein at least one loop domain of the plurality of loop domains has been modified, may be obtained in accordance herewith. Thus the HIBP polypeptides obtained in accordance herewith may be prepared in substantially pure form. By “substantially pure” it is meant that the immunogenic protein is separated from other host cell components. In accordance here with the immunogenic protein is at least 95% pure, and more preferably at least 96%, 97%, 98% or 99% pure. Alternatively, relatively crude fractions comprising the HIBP polypeptide may be obtained, e.g. cells containing the polypeptides, cell lysates containing the polypeptides, or cellular fractions containing the polypeptide.

[0215] In further embodiments, the present disclosure provides methods for eliciting an immune response in a vertebrate subject. The immune response may be elicited by the delivery of the immunogenic protein or by the delivery of an expression vector comprising a nucleic acid sequence encoding the immunogenic protein. Accordingly, the present disclosure further provides a method for eliciting an immune response in a vertebrate subject, said method comprising administering to the subject:
[0216] (a) an immunogen comprising a polypeptide comprising a C-lobe domain or N-lobe domain of an HIBP surface receptor protein obtainable from a Gram-negative bacterial species, wherein polypeptide is unable to substantially bind host iron binding protein; or
[0217] (b) an expression vector comprising a nucleic acid sequence encoding an immunogen comprising a polypeptide comprising a C-lobe domain or N-lobe domain of an HIBP surface receptor protein obtainable from a Gram-negative bacterial species wherein the polypeptide is unable to substantially bind host iron binding protein; and

[0218] wherein the immunogen is administered in, or is expressed in, an amount sufficient to elicit an immune response in the vertebrate subject.

[0219] The present disclosure also provides a use of:
[0220] (a) an immunogen comprising a polypeptide comprising a C-lobe domain or N-lobe domain of an HIBP surface receptor protein obtainable from a Gram-negative bacterial species, wherein polypeptide is unable to substantially bind host iron binding protein; or
[0221] (b) an expression vector comprising a nucleic acid sequence encoding an immunogen comprising a polypeptide comprising a C-lobe domain or N-lobe domain of an HIBP surface receptor protein obtainable from a Gram-negative bacterial species wherein the polypeptide is unable to substantially bind host iron binding protein;
   for eliciting an immune response in a vertebrate subject.

[0222] The present disclosure further provides a use of:
[0223] (a) an immunogen comprising a polypeptide comprising a C-lobe domain or N-lobe domain of an HIBP surface receptor protein obtainable from a Gram-negative bacterial species, wherein polypeptide is unable to substantially bind host iron binding protein; or
[0224] (b) an expression vector comprising a nucleic acid sequence encoding an immunogen comprising a polypeptide comprising a C-lobe domain or N-lobe domain of an HIBP surface receptor protein obtainable from a Gram-negative bacterial species wherein the polypeptide is unable to substantially bind host iron binding protein;
   in the manufacture of a medicament for eliciting an immune response in a vertebrate subject.

[0225] The present disclosure yet also provides:
[0226] (a) an immunogen comprising a polypeptide comprising a C-lobe domain or N-lobe domain of an HIBP surface receptor protein obtainable from a Gram-negative bacterial species, wherein polypeptide is unable to substantially bind host iron binding protein; or
[0227] (b) an expression vector comprising a nucleic acid sequence encoding an immunogen comprising a polypeptide comprising a C-lobe domain or N-lobe domain of an HIBP surface receptor protein obtainable from a Gram-negative bacterial species wherein the polypeptide is unable to substantially bind host iron binding protein;
   for eliciting an immune response in a vertebrate subject.

[0228] In preferred embodiments, the polypeptide comprises at least two C-lobe domains, or at least two N-lobe domains. In further preferred embodiments, the polypeptide comprises at least three C-lobe domains, or at least three N-lobe domains.

[0229] In certain embodiments, the C-lobe domain or N-lobe domain comprises a plurality of β-strands connected by a plurality of loop domains, and wherein at least one loop domain of the plurality of loop domains has been modified in such a manner that the C-lobe domain or N-lobe domain is unable to substantially bind host iron binding protein.

[0230] The present disclosure further includes an immunogen comprising a C-lobe domain or an N-lobe domain of an HIBP surface receptor polypeptide wherein the C-lobe domain or the N-lobe domain comprises a plurality of β-strands connected by a plurality of loop domains, and wherein at least one loop domain has been modified for use as a medicament.

[0231] The present disclosure further includes an immunogen comprising a C-lobe domain or an N-lobe domain of an HIBP surface receptor polypeptide wherein the C-lobe domain or the N-lobe domain comprises a plurality of β-strands connected by a plurality of loop domains, and wherein at least one loop domain has been modified for use in the prevention of infection or disease by infectious Gram-negative bacteria, including bacteria belonging to the genus Actinobacillus, Neisseria, Haemophilus, Mannheimia, Histophilus, Pasteurella or Moraxella.

[0232] The present disclosure further includes an immunogen comprising a C-lobe domain or an N-lobe domain of an HIBP surface receptor polypeptide wherein the C-lobe domain or the N-lobe domain comprises a plurality of β-strands connected by a plurality of loop domains, and wherein at least one loop domain has been modified for use in the manufacture of a medicament for the prevention of infection or disease by infectious Gram-negative bacteria, including bacteria belonging to the genus Actinobacillus, Neisseria, Haemophilus, Mannheimia, Histophilus, Pasteurella or Moraxella.

### Vaccine Preparations

[0233] The present disclosure further provides vaccine preparations. Thus, the present disclosure further provides a vaccine composition comprising an antigen derived from a HIBP surface receptor protein from a Gram-negative pathogenic bacterial species, wherein the protein derived from the HIBP surface receptor protein has been modified in such a manner that it is unable to substantially bind host iron binding protein. The vaccine compositions of the present disclosure preferably comprise a vaccine comprising a polypeptide comprising, an HIPB surface receptor protein, a C-lobe domain or N-lobe domain of an HIBP surface receptor protein obtainable from a Gram-negative pathogenic bacterial species wherein the polypeptide is modified in such a manner that it is unable to substantially bind host iron binding protein. In preferred embodiments, the vaccine preparation comprises a mixture of C-lobe domains belonging to two different bacterial species or two different bacterial strains. In further preferred embodiments, the polypeptide comprises at least two or at least three N-lobe domains or C-lobe domains. In further preferred embodiments, said at least two or at least three N-lobe domains or C-lobe domains form a heteromultimer. In further embodiments, the C-lobe domain or N-lobe domain comprises a plurality of β-strands connected by a plurality of loop domains, and wherein at least one loop domain of the plurality of loop domains has been modified.

[0234] The vaccine preparations of the present disclosure comprise the immunogenic HIBP polypeptides in more or less pure form. Thus, in accordance herewith, substantially pure HIBP polypeptides may be obtained and used to prepare vaccine formulations. In other embodiments more crude HIPB polypeptide preparations may be obtained and used to prepare vaccine formulations. Thus, for example, in such embodiments cells, cell lysates or cell fractions comprising the HIBP polypeptides may be used to prepare the vaccine formulations.

[0235] In order to augment an immune response in a subject, the compositions provided herein further preferably include adjuvants, such as pharmacological agents, cytokines, or the like. Suitable adjuvants include any substance that enhances the immune response of the subject to the immunogenic polypeptides of the disclosure. Non-limiting examples of adjuvants include cytokines, e.g., IL-1, IL-2, IL-12, IL-6, and further include inorganic salts, e.g. aluminum hydroxide, aluminum phosphate, and calcium phosphate; oil emulsions, eg. mineral oil, MF59, QS-21, Montamide ISA51 and ISA-720; Isocoms, eg. ISCOMATRIX; microbial derivatives, eg. MPLA, macrophage-activating protein-2, virosomes, LT/CT, CpG; natural polymers, eg. polysaccharides; and synthetic polymers, eg. polyanhydrides and polyesters, as reviewed in Wilson-Welder et al. (54). Adjuvants may be administered, for example, as proteins or other macromolecules at the same time, prior to, or subsequent to, administration of the polypeptide antigens.

[0236] Doses for immunogenic proteins, generally range from about 0.1 μg to about 20 mg, preferably 10 μg to about 3 mg for human subjects. The exact amount necessary, however, will vary depending on the age and general condition of the recipient subject to be treated, the severity of the condition being treated, the particular preparation delivered, the site of administration, as well as other factors. An appropriate therapeutically effective amount can be readily determined by one of skill in the art. Thus, a “therapeutically effective amount” of the present compositions will be an amount sufficient to bring about treatment or prevention of disease or condition symptoms, or to prevent colonization by the pathogenic bacteria, and will fall in a relatively broad range that can be determined through routine trials.

[0237] Vaccine preparations comprising the immunogenic composition of the present disclosure preferably further comprise vehicles, excipients and auxiliary substances, such as wetting or emulsifying agents, pH buffering substances and the like, may be present in the excipient or vehicle. These vehicles, excipients and auxiliary substances are generally pharmaceutical agents that do not induce an immune response in the recipient subject, and may be administered without undue toxicity. Pharmaceutically acceptable excipients include, but are not limited to, liquids such as water, saline, polyethyleneglycol, hyaluronic acid, glycerol and ethanol. Pharmaceutically acceptable salts can also be included therein, for example, mineral acid salts such as hydrochlorides, phosphates, sulfates, and the like; and the salts of organic acids such as acetates, propionates, benzoates, and the like. It is also preferred, although not required, that the preparation will contain a pharmaceutically acceptable excipient that serves as a stabilizer, particularly in order to stabilize the polypeptides of the present disclosure. Examples of suitable carriers that also act as stabilizers for peptides include, without limitation, pharmaceutical grades of dextrose, sucrose, lactose, sorbitol, inositol, dextran, and the like. Other suitable carriers include, again without limitation, starch, cellulose, sodium or calcium phosphates, citric acid, glycine, polyethylene glycols (PEGs), and combinations thereof.

[0238] The vaccine preparations of the present disclosure may be used to prevent infection or disease caused by infectious Gram-negative bacteria, including, without limitation, bacteria belonging to the genus Actinobacillus, Neisseria, Haemophilus, Mannheimia, Histophilus, Pasteurella or Moraxella, including without limitation Actinobacillus pleuropneumoniae, Actinobacillus suis, Haemophilus parasuis, Neisseria meningitidis. The vaccine preparations may be used to immunize any vertebrate subject including any vertebrate subject expressing host iron binding proteins and including, without limitation, any mammalian subject, including any human subject, porcine subject, bovine subject, equine subject, ovine subject, hircine subject, canine subject, feline subject, leporine subject and, further any ruminant subject, and murine subject. Other vertebrate subjects that may be immunized include any avian subject and piscine subject. The vaccine preparations of the present disclosure may exhibit an enhanced cross-reactive and/or cross-protective immunological response in the recipient host organism. It is further noted that the vaccine preparations of the present disclosure may prevent infection and/or colonization by the infectious Gram-negative bacteria, including bacterial colonization of the respiratory tract or genital tract of a vertebrate subject.

[0239] The present disclosure further includes a vaccine comprising an HIPB surface receptor protein, a C-lobe domain or an N-lobe domain of an HIBP surface receptor polypeptide wherein the C-lobe domain or the N-lobe domain comprises a plurality of β-strands connected by a plurality of loop domains, and wherein at least one loop domain has been modified for use in the prevention of infection or disease by infectious gram-negative bacteria, including bacteria belonging to the genus Actinobacillus, Neisseria, Haemophilus, Mannheimia, Histophilus, Pasteurella or Moraxella.

### Testing Vaccine Preparations

[0240] In accordance herewith the efficacy of the vaccine preparations of the present disclosure may be evaluated, for example by determining the antibody titre present in blood serum of subjects immunized with a vaccine preparation, e.g. by the performance of an Enzyme Linked Immuno Sorbent Assay (ELISA). Accordingly the present disclosure further comprises a method for evaluating the efficacy of a vaccine preparation comprising a C-lobe domain or N-lobe domain of an HIBP surface receptor protein obtainable from a Gram-negative pathogenic bacterial species wherein the polypeptide is modified in such a manner that it is unable to substantially bind host iron binding protein, the method comprising:
[0241] (a) administering to a vertebrate subject a vaccine preparation comprising an HIPB surface receptor protein, or a C-lobe domain or an N-lobe domain of an HIBP surface receptor polypeptide obtainable from a Gram-negative pathogenic bacterial species wherein the polypeptide is modified in such a manner that it is unable to substantially bind host iron binding protein;
[0242] (b) obtaining blood serum from the vertebrate subject; and
[0243] (c) assaying the blood serum for the presence of antibodies against the HIBP surface receptor polypeptides.

[0244] The vertebrate blood serum may be assayed following the administration of single or multiple (e.g. 2, 3, or 4) doses of a vaccine preparation. Assays, such as ELISA assays, may be performed using HIBP surface receptor protein isolates from a single or multiple microbial different strains or species. ELISA assays may involve linking of the HIBP surface receptor polypeptide to a carrier protein, such as a maltose binding protein. Where the reactivity of antibodies against multiple HIBP surface receptor protein isolates is assayed, it is possible to evaluate the vaccine preparation for cross-reactivity.

### Vaccination Regimens

[0245] As is apparent to those skilled in the art in view of the teachings of this specification, vaccination with the above-described polypeptides or with nucleic acid sequences encoding such polypeptides (DNA vaccines) can be effected in one dose, continuously or intermittently throughout the course of treatment. Methods of determining the most effective means and dosages of administration are well known to those of skill in the art and will vary with the delivery vector, the nature of the composition, the specific prophylaxis or therapy sought, the target cells, and the subject being treated. Single and multiple administrations can be carried out with the dose level and pattern being selected by suitable medical personnel.

[0246] Administration of the above-described pharmaceutical preparations can be effected in one dose, continuously or intermittently throughout the course of treatment. Delivery will most typically be via conventional needle and syringe for the liquid compositions and for liquid suspensions containing particulate compositions. In addition, various liquid jet injectors are known in the art and may be employed to administer the present compositions. The route of vaccine delivery may vary. Thus the vaccines of the present disclosure may be delivered intravenously, subcutaneous, intramuscular, intravaginal, intraperitoneal, intranasal, oral or via other mucosal routes. Methods of determining the most effective means and dosages of administration are well known to those of skill in the art and will vary with the delivery vehicle, the composition of the therapy, the target cells, and the subject being treated. Single and multiple administrations can be carried out with the dose level and pattern being selected by the attending physician or veterinarian.

### EXAMPLES

[0247] Below are examples of specific embodiments for carrying out the present disclosure. The examples are offered for illustrative purposes only, and are not intended to limit the scope of the present disclosure in any way.

### Example 1

### Immune Response with a TbpB C-Lobe Domain, TbpB N-Lobe Domain and Mixture Thereof

[0248] This Example provides an illustration of the value of using subdomains of the TbpB receptor proteins to obtain a more desirable immune response. In regards to what we mean by a more desirable immune response we consider both the magnitude of the antibody response and the cross-reactivity of the antibodies with variant TbpB proteins.

[0249] FIG. 3A illustrates the results from the first experiment for this Example in which different host species (mice, rabbits and pigs) were immunized with intact TbpBs from the human pathogen Neisseria meningitidis (strain B16B6—SEQ.ID NO: 117) or from the porcine pathogen Actinobacillus pleuropneumoniae (strain H49—SEQ.ID NO: 2). The sera from immunized animals were tested against the immunizing antigen in our customized ELISA assay (see below). The results illustrate that the magnitude (titre) of the antibody response in the pig with the TbpB from the pig pathogen A. pleuropneumoniae (grey bar) was substantially lower than in the other host species compared to the TbpB from the human pathogen N. meningitidis (black bar) suggesting that binding of host transferrin was influencing development of the antibody response against TbpB.

[0250] The second experiment (FIG. 3B) involves immunization of pigs with intact TbpB from the bovine pathogen Mannhemia haemolytica (strain H196—SEQ.ID NO: 206) or the intact TbpB (SEQ.ID NO: 2), TbpB N-lobe (SEQ.ID NO: 8) or TbpB C-lobe (SEQ.ID NO: 6) from the porcine pathogen Actinobacillus pleuropneumoniae (strain H49). FIG. 3B illustrates the immune response in individual pigs (cluster of bars) before immunization (white bar), after the first immunization (light grey bar), after the second immunization (dark grey bar) and after the third immunization (black bar). Note that the titres are expressed as a binary logarithm to reflect the two-fold dilutions used in evaluating titre. Most of the pigs displayed high titres of antibody (between 26,000 and 256,000) after the third immunization but several of the pigs immunized with intact TbpB or TbpB N-lobe from A. pleuropneumoniae displayed substantially reduced titres (between 5,300 and 8,000). The observation that two of the four pigs immunized with intact TbpB and three of the pigs immunized with TbpB N-lobe displayed substantially reduced titres suggests that binding of host transferrin influences the development of the antibody response only in a subset of the animals.

[0251] The third experiment illustrated in this example (FIG. 3C) was designed to evaluate the ability of sera against intact TbpB and its subdomains to react with different representative TbpBs from porcine pathogens in order to evaluate the cross-reactivity of the antisera. Pigs were immunized with the intact TbpB (SEQ.ID NO: 2), the TbpB C-lobe domain (SEQ.ID NO: 6), the TbpB N-lobe domain (SEQ.ID NO: 8) or a mixture of the TbpB N-lobe and TbpB C-lobe. The sera were tested against (i) the intact TbpB from Actinobacillus pleuropneumoniae strain H49 (SEQ.ID NO: 2), (ii) the intact TbpB from Haemophilus parasuis strain HP5, (SEQ.ID NO: 115) or (iii) the intact TbpB from Actinobacillus pleuropneumoniae strain H87 (SEQ.ID NO: 12).

[0252] The results in FIG. 3C illustrate that the TbpB C-lobe domain from A. pleuropneumoniae strain H49 induces a more cross-reactive immune response than the intact TbpB (higher titre against the heterologous TbpB from strain H87) or the TbpB N-lobe (higher titres against strain H87 and HP5). The TbpBs used in this assay were designed to represent the overall sequence and structural diversity present in clinical disease isolates of A. pleuropneumoniae, A. suis and Haemophilus parasuis from pigs around the world (SEQ.ID NO: 2; SEQ.ID NO:12; SEQ.ID NO: 28; and SEQ.ID NO: 107 to SEQ.ID NO: 115) (FIG. 4). Thus in this example we are not limiting our analysis to a single pig pathogen but are targeting three distinct pig pathogens that are problematic for the worldwide pig industry. The fact that these pathogens happen to share a common mechanism for acquiring iron from the host provides a unique opportunity to develop a vaccine targeting the three pathogens from a common antigen, TbpB. These results indicate that by using one or more C-lobe domains as an antigen it is feasible to produce a broadly cross-reactive response against pig pathogens worldwide and thus could consider vaccination to eliminate the presence of these pathogens globally.

[0253] Surprisingly, the enhanced cross-reactivity induced by the C-lobe domain was retained even when the C-lobe was mixed with the N-lobe in the immunizing mixture (FIG. 3C, “N+C lobe”). These results teach us that antigens with smaller variable loop regions (the “C-lobe” compared to the “N-lobe”, FIG. 1) are capable of inducing a more cross-reactive antibody response, and that this enhanced ability to induce a cross-reactive immune response is retained even when the C-lobe is combined with other antigens in the immunizing mixture. More specifically, these results indicate that the tendency for the N-lobe to generate a more strain specific immune response is only capable of effectively inhibiting induction of a cross-reactive immune response by the C-lobe when it is physically linked to the N-lobe. In other words, surprisingly, the propensity of the N-lobe to generate a more specific immune response is substantially reduced when the N-lobe is mixed with the C-lobe. To the best of our knowledge this phenomenon has not been described previously.

[0254] The results also suggest that there is a reduced response against the intact TbpB and TbpB N-lobe relative to the C-lobe (FIG. 3B, 3C), which could indicate that binding of host transferrin, a feature only present in the intact TbpB and TbpB N-lobe, may be modulating the immune response in pigs.

[0255] It is important to mention that in contrast to previous published studies we did not use the standard ELISA method for measuring antibody levels since we identified a major deficiency in the standard ELISA method. We observed that in contrast to what is commonly assumed, purified proteins do not necessarily bind randomly to the ELISA plates, providing potentially strong biases or deficiencies in evaluating the binding of antibodies to epitopes on the surface of the protein. In particular we noted that TbpB, and particularly the N-lobe of TbpB, essentially binds to the solid surface of ELISA plates in one orientation, masking the Cap region of the N-lobe so that the binding of transferrin cannot be detected (FIG. 5). In contrast, the recombinant fusion protein with an N-terminal maltose binding protein (Mbp) partner that was the precursor for the purified TbpB N-lobe was proficient in transferrin binding (FIG. 5). This phenomenon was observed with TbpB N-lobes from human, pig and cattle pathogens, and to a lesser extent, the intact TbpBs. Since these proteins are quite different in sequence (<30% overall sequence identity) it indicates that this is not a unique property of a specific protein but there may be varying degrees to which nonrandom binding impacts solid-phase binding assays.

[0256] To overcome this deficiency we devised a method for binding recombinant proteins to streptavidin-coated ELISA plates by virtue of a biotin residue that was enzymatically added to the N-terminus during protein expression in the cytoplasm. As shown in FIG. 5, the addition of an enzymatically biotinylated N-terminal peptide restored the ability of the TbpB N-lobe to bind transferrin. This approach may be more efficient at exposing the transferrin-binding region as comparison of the results with the Tbp N-lobe fused to Mbp in the left and right side of the figure indicates. This new and novel ELISA assay format was used in all our ELISA assays for monitoring antibody reactivity since it ensured complete and equal access to all epitopes on the target protein, thus providing a true comparison in evaluating the degree of cross-reactivity.

[0257] The recombinant antigens for the immunization experiments were produced in the cytoplasm of E. coli using a custom T7 expression vector encoding an N-terminal polyhistidine tag, a maltose binding protein and a tobacco etch virus (TEV) protease cleavage site. The recombinant fusion proteins were isolated by Ni-NTA chromatography, the antigens released by (TEV) cleavage and purified by a combination of Ni-NTA and Q-Sepharose chromatography.

[0258] FVB mice (albino MHC haplotype H2q from Charles River), 3 month-old New Zealand White rabbits and 51 day-old Large White Landrace F1 cross pigs were used for the immunization experiment in FIG. 3A. Purified recombinant proteins were mixed with phosphate buffered saline and either 33% (FIG. 3A) or 20% (FIG. 3B, FIG. 3C) Emulsigen D (MVP Technologies) to a final concentration of 25 μg in 0.1 ml for mice, 50 μg in 0.5 ml for rabbits and 100 μg in 2 ml for pigs. Three injections were administered sub-cutaneously for mice and rabbits and sub-cutaneously (FIG. 3A) or intramuscularly (FIG. 3B, FIG. 3C) for pigs. The animals were immunized on day 0, 21, 42 and final blood was collected on day 56.

[0259] Sera taken at week 8 were tested against representative proteins in our custom solid-phase ELISA assay. The recombinant fusion proteins used in the ELISA assay were produced in the cytoplasm of E. coli using a custom T7 expression vector encoding an N-terminal optimized biotinylation sequence, a polyhistidine tag, a maltose binding protein and a tobacco etch virus (TEV) protease cleavage site. These proteins were biotinylated in vivo at the N-terminal biotinylation sequence so that they could be applied to streptavidin coated ELISA plates.

[0260] Crude extracts from small-scale overnight protein expression experiments with the expression vector for the biotinylated fusion proteins were sufficient to saturate the ELISA plates based on prior optimization experiments. Dilutions of the antisera of interest were prepared in 2.5% skim milk in phosphate buffer saline (PBST) and applied to the plates for 1 hour at room temperature. After removal and washing the primary antibody was detected by HRP-conjugated goat anti-mouse, anti-rabbit or anti-swine IgG at a dilution of 1:100,000 (1:25,000 for anti-swine) for one hour at room temperature. The titre is expressed as the reciprocal of the last dilution with an A450>0.3 (greater than the mean plus three standard deviations of the background reading of wells without sera added).

[0261] The calculation of SEM error was done via ANOVA with Tukeys HSD (honest significant difference) test done as post hoc. The statistics showed that for all the sera, H49 is significantly different from H87 and that the N lobe is significantly different from the C lobe or the N+C lobe. The stars shown in FIG. 3C denote specific immunization/protein pairs that differ significantly from the C lobe or N+C lobe tested against H49.

### Example 2

### Production of a Trimer of Porcine Pathogen TbpB C-Lobes

[0262] In this Example we demonstrate that three recombinant engineered C-lobes that represent a wide diversity of TbpBs present in the three porcine pathogens, may be linked together and retain antigenicity. The engineered C-lobes used here are those obtained from A. pleuropneumoniae, A. suis and Haemophilus parasuis (FIG. 4). Thus the genes encoding the TbpB C-lobes from strains A. pleuropneumoniae H49 (SEQ.ID NO: 6), A. suis H57 (SEQ.ID NO: 35) and A. pleuropneumoniae H87 (SEQ.ID NO: 22) were linked to form a gene encoding a single polypeptide encompassing the three C-lobes (SEQ.ID NO: 40) Panel A of FIG. 6. There are relatively short peptides connecting the secondary structural elements of the C-lobes (indicated by underline) in this C-lobe trimer. The linking peptides consist of authentic interlobe sequence from the individual C-lobe domains. Panel B of FIG. 6 illustrates the production of the C-lobe trimer and is compared to preparations of recombinant engineered TbpB N-lobe and C-lobe from the human pathogen N. meningitidis strain M982. The results indicate that the C-lobe trimer is produced in good quantity and is stable. However the preparation illustrated in FIG. 6 requires additional purification prior to use in immunization experiments.

[0263] Since there was no major barrier to the production of a stable C-lobe trimer, the C-lobe trimer was produced and purified for an immunization experiment to determine whether it retained immunogenicity. As illustrated in FIG. 7, the C-lobe trimer was able to induce an immune response against the three representative TbpBs, indicating that linking the three individual C-lobes together did not substantially alter their immunological properties. The results also suggest that a single protein antigen may be able to induce an immune response capable of reacting with most, if not all strains of the pleuropneumoniae, A. suis and Haemophilus parasuis, pig pathogens, showing potential promise for development of a broadly cross-protective pig vaccine.

### Example 3

### Reduction of Loop Regions in the N-Lobe of A. pleuropneumoniae TbpB

[0264] In this Example, the loop regions of the N-lobe domain from three representative TbpBs from porcine pathogens were modified in order to determine their impact on induction of a cross-reactive immune response. The three representative TbpBs were from A. suis strain H57 (SEQ.ID NO: 28), A. pleuropneumoniae strain H87 (SEQ.ID NO: 12) and A. pleuropneumoniae strain H49 (SEQ.ID NO: 2). These particular TbpBs were selected because in addition to representing sequence diversity, there was high-resolution structural data available; A, suis strain H57 (3PQU.pdb), A. pleuropneumoniae strain H87 (3PQS.pdb) and A. pleuropneumoniae strain H49 (3HOL.pdb). The loop reduction process resulted in an overall loss of 74 amino acids (297-224) for the TbpB N-lobe from A. suis strain H57 (SEQ.ID NO: 36,38), 45 amino acids (248-203) for the TbpB N-lobe from A. pleuropneumoniae strain H87 (SEQ.ID NO: 24,26) and 27 amino acids (274-247) for the TbpB N-lobe from the A. pleuropneumoniae strain H49 (SEQ.ID NO: 8,10). The design of the loop reduction for A. pleuropneumoniae strain H49 is described in more detail below for illustrative purposes.

[0265] To design the loop reductions, the structure of TbpB from strain H49 (3HOL.pdb) was superimposed with the structure of TbpB from strain H87 (3PQS.pdb) while simultaneously viewing a multiple sequence alignment from a set of representative TbpBs from porcine pathogens. By examining the structure and regions of variation, several areas for potential loop reduction were identified that were predicted to not perturb the overall structure of the N-lobe. These include loops 1, 5, 8a, 8c and 12 according to the standard nomenclature (FIG. 2) and are illustrated in FIG. 8 on structural models of a side view (Panel A) and top view (Panel B) of the TbpB N-lobe. Loop reductions were designed to minimize the potential perturbation to the overall folding and structure of the N-lobe by selecting appropriate amino acid replacements as needed in addition to the removal of amino acids. The amino acid sequence of the original N-lobe (top sequence) and the modified N-lobe (bottom sequence) are illustrated in the sequence alignment in FIG. 8, Panel C where the loop regions are highlighted in grey and labeled in grey font. The DNA sequence encoding the amino acid sequence illustrated in Panel C was optimized for expression in E. coli strain and then synthesized.

[0266] A similar strategy was adopted to generate loop reductions for the TbpB N-lobes from A. pleuropneumoniae strain H87 and A. suis strain H57 since they represent considerable sequence and structural diversity of the TbpBs from porcine pathogens (FIG. 4) and the relevant structures are available (3PQS.pdb and 3PQU.pdb) (12). The potential of producing engineered antigens that collectively could induce a cross-reactive response against the N-lobe regions of most if not all, clinical isolates, would have considerable potential for enhancing the effectiveness of a vaccine targeting the three porcine pathogens.

[0267] The resulting genes were cloned into a custom expression vector that encodes an N-terminal polyhistidine region, maltose binding protein and TEV (tobacco etch virus) cleavage site preceding the coding sequence for the cloned N-lobe. The expression plasmid for the engineered version of the TbpB N-lobe from A. pleuropneumoniae strain H49 was transformed into the E. coli expression strain ER256 that carries a chromosomal copy of the T7 RNA polymerase gene inserted downstream of the lacZ promoter. A small-scale expression analysis was performed using auto-induction media (55) that capitalizes on glucose repression and lactose induction of the lac promoter. Thus by using a specific ratio of glucose to lactose into the media, expression of the T7 RNA polymerase is optimally initiated at mid-log phase of growth. Cells were lysed after overnight growth with a bead beater to lyse the cells, the recombinant proteins were captured with either a Ni-NTA resin or a porcine Tf-Sepharose resin, washed and the bound proteins eluted in SDS-PAGE buffer.

[0268] As illustrated in FIG. 9 the loop reductions in the TbpB N-lobe from A. pleuropneumoniae strain H49, A. suis strain H57 or A. pleuropneumoniae strain H87 resulted in the production of stable proteins, thus not interfering with the overall folding of the N-lobe, and providing material suitable for immunization. The upper panel shows recombinant proteins produced in a small-scale expression experiment captured on a Ni-NTA resin with the wild-type intact TbpB and TbpB N-lobe as controls. The results also show, that unlike that wild-type protein, the mutant proteins were no longer capable of substantially binding to porcine transferrin (Tf). Thus in the middle panel the engineered N-lobes were not captured by porcine Tf-Sepharose. In the bottom panel the material illustrated in the top panel was used in a solid-phase binding assay using HRP-conjugated porcine transferrin and, unlike the controls, the engineered N-lobes did not display any binding activity. We anticipate that there will be enhanced immunogenicity of these proteins in the native host, pigs. Thus this example shows that strategies for removal of antigenically variable regions in the N-lobe of TbpB proteins are feasible and that such removal can result in enhanced immunogenicity.

### Example 4

### Cross-Reactivity of C-Lobes of N. meningitidis TbpB

[0269] This example illustrates the use of engineered derivatives of TbpBs from the human pathogen Neisseria meningitidis in accordance with the present disclosure. As a first step we examined the diversity of TbpBs from N. meningitidis and ensured that we would have a representative set of TbpBs for our evaluation of cross-reactivity. FIG. 10 illustrates the overall diversity of TbpBs in strains of N. meningitidis that were collected globally over a long time period plus additional sequences from the Neisseria Bacterial Isolate Genome Sequence Database (BIGSDB http://pubmlst.org/neisseria/)(56) (41). The sequences for a representative set of TbpBs (SEQ ID NO: 117; SEQ.ID NO: 123; SEQ.ID NO: 132 to SEQ.ID NO 147; SEQ.ID NO: 177; and SEQ.ID NO: 178) from strains indicated by arrows, double arrows or lines in FIG. 10A are included in this application to define the sequence diversity in each group. There were four major phylogenetic groupings of the N. meningitidis TbpBs. Group 1 includes strains that possess isotype I TbpBs. Isotype I TbpBs characteristically have smaller TbpBs (approximately 65-70 kDa) compared to the isotype II TbpBs (80-85 kDa). Comparison of the sequences by multiple sequence alignments revealed that difference in size is largely attributed to the C-lobe being larger in isotype II TbpBs. The isotype II TbpBs clustered into three major phylogenetic groups (Groups 2-4, FIG. 10A).

[0270] A phylogenetic tree illustrating the sequence diversity of the TbpB C-lobes (FIG. 10B) supports the conclusion that the C-lobe sequences are largely responsible for the identification of the two TbpB isotypes. The members of Group 2 in FIG. 10A do not cluster together in the C-lobe phylogenetic tree but are distributed throughout the tree in FIG. 10B, indicating that Group 2 was largely defined by the N-lobe sequences. This indicates that if immunological cross-reactivity is going to be determined by reactivity against the C-lobe, specific representatives of group 2 would not be required. In contrast, the arrows and lines that were used to identify a set of TbpB sequences to represent the overall TbpB diversity did not adequately represent the overall C-lobe diversity, thus two additional strains were selected to provide a more comprehensive representation of the C-lobe diversity. The C-lobe sequences from strains identified by the arrows, double arrows or lines are included in this application to provide a representative sample of the sequence diversity (SEQ ID NO: 87; SEQ.ID NO: 93; and SEQ.ID NO: 147 to SEQ.ID NO: 163).

[0271] In order to address the question as to whether a vaccine targeting the TbpB from N. meningitidis might induce an immune response directed against gonorrhoeae we performed an analysis of the sequence diversity of the TbpB and TbpB C-lobes from N. gonorrhoeae. The sequences of the representative TbpBs and TbpB C-lobes from the N. meningitidis study (FIG. 10; SEQ.ID NO; 119; SEQ.ID NO: 125; SEQ.ID NO: 179 to SEQ.ID NO: 195; SEQ.ID NO: 117; SEQ.ID NO: 123; SEQ.ID NO: 132 to SEQ.ID NO: 147; SEQ.ID NO: 177; and SEQ.ID NO: 178) were included in the analysis. As illustrated in FIG. 26A, the N. gonorrhoeae TbpBs are most closely related to the isotype 2 TbpBs and form two subgroups within the N. meningitidis isotype 2 cluster. This suggests that with strategies using site-directed mutants of recombinant TbpB as preferred vaccine antigens, it might be possible to achieve broad cross-protection primarily with antigens derived from meningococcal TbpBs. FIG. 26B illustrates that, in contrast to the situation with the intact TbpBs, the N. gonorrhoeae TbpB C-lobes are a distinct subgroup from the N. meningitidis C-lobes. Thus with strategies using C-lobes to provide broad cross-protection, C-lobes from N. gonorrhoeae strains would be required.

[0272] In order to compare the ability of the truncated TbpB and the TbpB C-lobe to induce a cross-reactive antibody response, a recombinant truncated TbpB and a TbpB C-lobe derived from N. meningitidis strain, B16B6 (marked by black arrow in FIG. 10), were selected for the immunological analysis. A recombinant truncated TbpB and a TbpB C-lobe from strain B16B6 were used to immunize rabbits and the sera was tested for cross-reactivity using our novel ELISA assay (FIG. 5). It is important to recognize that many of the sequences of the C-lobes included in this application start just after the end of the last beta-strand of the barrel domain on the N-lobe, thus include the linker region between the N-lobe and C-lobe (L15, FIG. 2). Thus it would be possible to prepare stable, functional C-lobes with N-terminal truncations that remove the L15 region (14 amino acids in the B16B6 C-lobe) for immunization experiments.

[0273] A representative set of TbpBs derived from strains distributed throughout the phylogenetic tree (black and grey arrows, FIG. 10) were selected to evaluate the cross-reactivity of the sera. Two additional TbpBs indicated by the two double-headed arrows would have been included in the analysis to provide more complete coverage, but were not available at the time of the analysis.

[0274] The proteins were expressed in our custom expression vector with an N-terminal biotinylation sequence, and were applied to streptavidin coated ELISA plates. The sera from rabbits immunized with the engineered C-lobe and truncated TbpB derived from strain B16B6 were tested for their ability to recognize the panel of TbpB variants. The antiserum against the truncated TbpB had higher titres against the homologous TbpB (B16B6) than the anti-C-lobe antiserum, and slightly higher or equivalent titres against the TbpB from one of the heterologous strains (H44/76). However, the anti-C-lobe antiserum had higher titres of antibody against TbpBs from all of the other heterologous strains than that anti-TbpB antiserum. Thus the C-lobe is superior in its ability to induce cross-reactive antibodies than the intact TbpB.

[0275] In this immunization experiment the recombinant antigens were produced as described above and used to immunize rabbits (New Zealand White, 3 months old, female) sub-cutaneously in the hind region using 50 μg of purified antigen in 20% Emulsigen D (VSA) adjuvant. The rabbits were immunized at 0, 3 and 6 weeks.

[0276] Sera taken at week 8 were tested against representative proteins in our custom solid-phase ELISA assay. The recombinant fusion proteins used in the ELISA assay were produced as described above. The recombinant proteins tested in the custom ELISA assay were truncated versions of the intact TbpBs (missing the first 19-36 amino acids) from N. meningitidis strains; (i) B16B6 (SEQ.ID NO: 117), (ii) H44/76 (SEQ.ID NO: 133), (iii) S3131 (SEQ.ID NO:132), (iv) M990 (SEQ.ID NO:134), (v) M978 (SEQ.ID NO:135), (vi) M992 (SEQ.ID NO:138), (vii) P3006 (SEQ.ID NO:139), (viii) 120M (SEQ.ID NO:137), (ix) MC58 (SEQ.ID NO:136) and (x) M982 (SEQ.ID NO: 123).

[0277] Crude extracts from small-scale overnight protein expression experiments with the expression vector for the biotinylated fusion proteins were sufficient to saturate the ELISA plates based on prior optimization experiments. Dilutions of the antisera of interest were prepared in 2.5% skim milk in phosphate buffer saline (PBST) and applied to the plates for 1 hour at room temperature. The primary antibody was detected by HRP-conjugated goat anti-rabbit IgG at a dilution of 1:100,000 for one hour at room temperature and the titre is expressed as the reciprocal of the last dilution with an A450>0.3.

### Example 5

### Production of a Dimer of N. meningitidis TbpB C-Lobes

[0278] The result in FIG. 11 illustrates that the TbpB C-lobe domain from the human pathogen N. meningitidis is capable of inducing an enhanced cross-reactive response relative to the intact TbpB. In this example we demonstrate that it is possible to generate a single polypeptide encompassing the two C-lobes that is stable and immunogenic. The two C-lobes are from strains with antigenically divergent TbpBs, strain B16B6 and M982, that represent the two isotypes of TbpB (FIG. 10). Panel A of FIG. 12 illustrates a single gene that was constructed to encode the two representative TbpB C-lobes (SEQ.ID NO: 150) used in the immunization experiments described in Example 4. Panel B of FIG. 12 illustrates the production of the C-lobe dimer compared to preparations of the individual constituent TbpB C-lobes. There are reasonable levels of production of the C-lobe dimer that appears to be relatively stable but additional purification would be required prior to use in immunization experiments.

[0279] FIG. 13 illustrates that the dimer consisting of the TbpB C-lobes from N. meningitidis strains M982 and B16B6 is capable of inducing an effective immune response against intact TbpBs from both species.

### Example 6

### Reduction of Loop Regions from the C-Lobe of N. meningitidis

[0280] In this Example we demonstrate it is possible to substantially reduce the loop regions from the C-lobe of N. meningitidis. Such reduction is useful in that it provides a derivative lacking the large loop regions which may be used as a convenient ‘scaffold’ for displaying epitopes from other antigens or other pathogens, and further may display desirable immunological properties.

[0281] In this example the loop regions of the C-lobe domain from N. meningitidis strain M982 were modified to remove a total of 82 amino acids from the large, flexible loop regions. Structural models of the native C-lobe and the engineered C-lobe with substantial reduction of four of the large flexible loops are illustrated in Panel A of FIG. 14. The four loops targeted for reduction were not resolved in the protein crystallography based structure (3VE2.pdb), indicating that there was variation in the conformation of the loops, which is why the loops are represented by dotted lines in model on the left in Panel A.

[0282] The strategy for loop removal was developed by examination of the detailed structure (3VE2.pdb) while evaluating the sequence variability in sequence alignments of selected C-lobes. However, providing the most effective bridge between the loops without potentially disrupting the structure was a dominant criteria for the selection of bridging amino acids. The alignment of sequences of the native C-lobe (SEQ.ID NO: 125), engineered derivatives lacking each of the targeted loops and a ‘loopless’ C-lobe with all four loops removed (SEQ.ID NO: 129) is illustrated in Panel 13 of FIG. 14.

[0283] Using the splicing by overlap extension approach (SOEing) (57) genes encoding the individual loop deletions and the ‘loopless’ C-lobe with all four loops removed were prepared. The SOEing approach was performed on the expression plasmid used for production of the recombinant C-lobe from N. meningitidis M982, so that the stability of the resulting engineered proteins could readily be evaluated. The vector encodes an N-terminal polyhistidine tag, the gene encoding maltose binding protein and a TEV (tobacco etch virus) cleavage site preceding the inserted gene encoding the TbpB C-lobe. The expression plasmid was transformed into the E. coli expression strain ER2566 that carries a chromosomal copy of the T7 RNA polymerase gene inserted into the lacZ gene, and thus is under the control of the lac promoter. A small-scale expression analysis was performed using auto-induction media (55). After overnight growth the cells were collected and lysed and the supernatant fraction after centrifugation was applied to a Ni-NTA resin, washed and the bound proteins eluted in SDS-PAGE buffer.

[0284] As illustrated in FIG. 15, the yields of the recombinant C-lobes with substantial reductions in loop 18, loop 21, loop 23 or loop 27 were comparable to the native C-lobe protein (WT), indicating that the removal of the individual loops did not adversely effect protein stability. FIG. 15 also shows that the removal of 81 amino acids in all four loops did not impact the level of protein produced, indicating that the removal of all four loops did not interfere with the overall folding of the C-lobe. It is salient to mention that the ‘loopless’ C-lobe was readily produced and purified in good quantity, and that the crystal structure has been obtained from the purified ‘loopless’ C-lobe. This indicates that the engineered antigens can readily be produced in a substantially stable form at levels of production that are suitable for commercial applications. Thus this example not only shows that strategies for removal of antigenically variable regions are feasible, but that the resulting protein may be suitable as an epitope display scaffold since the folding of the core structure is not influenced by variations in the size and nature of the loops.

[0285] Finally, as illustrated in FIG. 16, the ‘loopless’ C-lobe (SEQ.ID NO: 129, last two bars) is immunogenic and capable of inducing a strong antibody response against the intact (native) TbpB antigen (SEQ.ID NO: 123). This figure illustrates that the loopless C-lobe actually induced higher titers of antibody against the TbpB from N. meningitidis strain M982 in mice than the original TbpB C-lobe (SEQ ID NO: 125) antigen (compare 3^{rd} and 1^{st} bars in the figure). Just as surprising is the observation that the ‘loopless’ C-lobe induced similar levels of antibodies against the heterologous TbpB from strain B16B6 as the native TbpB C-lobe from B16B6, in spite of the fact that it is quite divergent in sequence (FIG. 10). Comparison of the 2^{nd} and 4^{th} bars in FIG. 16 illustrate that these two proteins induce a similar level of antibodies against intact TbpB from strain B16B6.

[0286] In these experiments FvB female mice were immunized with 25 ug of purified protein antigen with 20% emulisgen D on day 0, 21 and 42 and sera taken at day 56 were assessed for endpoint titre using our custom ELISA assay. The B16B6 TbpB C lobe, M982 TbpB C lobe, or modified M982 TbpB (‘loopless’) were used to immunized four mice each. Endpoint titres were assessed against biotinylated intact M982 or B16B6 TbpB protein. Titres were determined with 1:100,000 of goat anti-mouse IgG H+L peroxidase conjugated antibody. Endpoint titres were determined as the inverse of the last dilution at which a positive signal could be confidently detected. Each serum was run in triplicate and results are shown as the average of all mice with that treatment+/−SEM.

### Example 7

### Insertion of Portions of TbpA into an Engineered C-Lobe of a TbpB

[0287] In this example, the DNA encoding segments of the extracellular surface loops of the integral outer membrane protein transferrin binding protein A, TbpA, were spliced into the gene encoding the modified or ‘loopless’ TbpB C-lobe from N. meningitidis strain M982, resulting in genes encoding various hybrid TbpA-TbpB proteins. The reason for splicing selected regions of TbpA onto the TbpB C-lobe scaffold is that it provides a more efficient means of production than the intact TbpA protein, and provides the ability to specifically target surface regions of TbpA for induction of antibody.

[0288] The gene encoding the modified C-lobe of the TbpB polypeptide (SEQ ID NO: 97) prepared in Example 6 was used as a starting point (see further: Panel A of FIG. 14 (middle model). The DNA encoding segments from different surface loops of TbpA (FIG. 17, Panel A) were spliced into the sites where the larger loops had been removed from the TbpB C-lobe polypeptide (FIG. 17, Panel B). Portions from the beta-barrel extracellular loops 3, 10, and 11 of TbpA (58) (space filled and labeled regions in Panel A) were inserted into the modified loop regions 18, 21 and 23 of the engineered TbpB C-lobe (Panel B). Similarly, a segment from the N-terminal plug region that inserts between the C1 and C2 domains of human transferrin in the TbpA-transferrin structure (plug loop, Panel A) was inserted into the modified loop 27 of the modified TbpB C-lobe.

[0289] Assembly of the TbpA loops on the TbpB C-lobe was done using the splicing by overlap extension approach (SOEing) (57). The SOEing approach was performed on the expression plasmid used for production of the recombinant C-lobe from N. meningitidis M982, so that the stability of the resulting engineered proteins could readily be evaluated. The vector encodes an N-terminal polyhistidine tag, the gene encoding maltose binding protein and a TEV (tobacco etch virus) cleavage site preceding the inserted gene encoding the TbpB C-lobe. The expression plasmids were transformed into the E. coli expression strain ER2566 that carries a chromosomal copy of the T7 RNA polymerase gene inserted into the lacZ gene, and thus is under the control of the lac promoter. A small-scale expression analysis was performed using autoinduction media (55). After overnight growth the cells were collected and lysed and the supernatant fraction after centrifugation was applied to a Ni-NTA resin, washed and the bound proteins eluted in SDS-PAGE buffer.

[0290] As illustrated in Panel A of FIG. 18, insertion of the foreign TbpA segments into the loops of the modified TbpB C-lobe resulted in the production of stable recombinant protein. The recombinant proteins illustrated in Panel A of FIG. 18 contained an N-terminal polyhistidine tag, a maltose-binding protein fusion partner and a TEV (tobacco etch virus) protease cleavage site. Panel B of FIG. 18 illustrates the release of the wild-type and mutant C-lobes from the recombinant protein fusion partner by cleavage with TEV protease. The results demonstrate that insertion of the foreign protein segments did not substantially affect the stability of the engineered C-lobe, suggesting that the foreign segments did not interfere with the normal folding of the core structural elements of the C-lobe. The implication of these results is that the C-lobe appears to be a stable and versatile protein scaffold for the display of foreign epitopes that could ultimately be used for display of epitopes from a variety of antigens and antigenic variants, providing an additional strategy for generating engineered antigens with the ability to generate a broadly cross-protective immune response.

[0291] Finally, as illustrated in FIG. 19, modified TbpB C-lobes containing regions of TbpA spliced into the regions where large loops were reduced or removed are immunogenic. This figure illustrates that hybrid TbpA-TbpB C-lobe proteins induced antibody titres equal to or higher than the parent modified (‘loopless’) C-lobe. Notably the proteins displaying regions from loop 10 and loop 11 from TbpA had the highest titres (2^{nd} and 3^{rd} bars in FIG. 19).

[0292] In this experiment, FvB female mice were immunized with 25 μg of purified protein antigen with 20% emulisgen D on day 0, 21 and 42 and sera taken at day 56 was assessed for endpoint titre using our custom ELISA assay. Three mice were immunized the ‘loopless’ C-lobe with all four loops removed (SEQ.ID NO: 97). Five mice were used for immunization with the each of the four other hybrid antigens; (i) the ‘loopless’ C-lobe with TbpA loop 10 inserted into the TbpB C-lobe loop 21 (SEQ.ID NO: 154), (ii) the ‘loopless’ C-lobe with TbpA loop 11 inserted into the TbpB C-lobe loop 23 (SEQ.ID NO: 156), (iii) the ‘loopless’ C-lobe with TbpA loop 3 helix inserted into the TbpB C-lobe loop 27 (SEQ.ID NO: 158), or (iv) the ‘loopless’ C-lobe with TbpA plug loop inserted into the TbpB C-lobe loop 18 (SEQ.ID NO: 160). The sera were tested against the biotinylated recombinant form of the modified M982 C-lobe displaying all four of the TbpA loops inserted (SEQ.ID NO: 131). Titres were determined with 1:100,000 of goat anti-mouse IgG H+L peroxidase conjugated antibody. Endpoint titres were determined as the inverse of the last dilution at which a positive signal could be confidently detected. Each serum was run in triplicate and results are shown as the average of all mice with that treatment+/−SEM.

### Example 8

### Insertion of Portions of LbpA into a Modified C-Lobe of a TbpB

[0293] In this example, segments of the extracellular surface loops of the integral outer membrane protein lactoferrin binding protein A, LbpA, from strain MC58 (SEQ.ID NO: 162), were spliced into the modified TbpB C-lobe from N. meningitidis strain M982 (SEQ. ID NO: 129) that was described in Example 6. The reason for splicing selected regions of LbpA onto the TbpB C-lobe scaffold is that it provides a more efficient means of production than the intact LbpA protein, and provides the ability to specifically target surface regions of LbpA for induction of antibody. In conjunction with Example 7, we are able to illustrate how the generation of hybrid proteins could provide the opportunity to induce an immune response against three different proteins present on the surface of N. meningitidis, providing a greater barrier to potential ‘vaccine escape’, in which an antigenic variant of a critical target protein is able to escape the impact of the immune response generated against the vaccine antigens.

[0294] Since there were no structures available for LbpA, structural modeling of LbpA was performed using 3 web-based protein prediction servers: SWISS MODEL, I-TASSER, and PHYRE2 in an attempt to attain the most appropriate model. Initially BLAST searches were performed to find the most appropriate LbpA for modeling with the known TbpA structure (58), and revealed that the LbpA from strain MC58 (SEQ.ID NO: 130) was the most appropriate. An alignment of MC58 LbpA with K454 TbpA was generated by ClustalW and served as the input for the alignment mode in SWISS MODEL. In PHYRE2, the FOB ID for K454 TbpA structure and the FASTA sequence of MC58 LbpA were submitted as template and target, respectively. Only the FASTA sequence of MC58 LbpA was submitted to I-TASSER. The root-mean-square deviation (RMSD) was used to evaluate the similarity of the different models generated with the template structure after superimposing them in Pymol (http://www.pymol.org/). The LbpA model generated by PHYRE2 was selected as the most appropriate model and was used to select the loop regions for generating the hybrid or chimeric protein (FIG. 20, Panel A).

[0295] The loopless' C-lobe of the TbpB polypeptide prepared in Example 6 (SEQ.ID NO: 129) was used as a starting point. DNA encoding regions from the LbpA extracellular loop 3 and loop 2 were inserted between the DNA encoding the beta-strands flanking loops 18 and 21 of the engineered TbpB C-lobe (FIG. 20, Panel B). Loop regions in TbpB C-lobe and the corresponding loops in LbpA for insertion were analyzed for distances using Pymol to ensure the LbpA replacement loops were structured to fit within the distance parameters predicted by the loop. Assembly of the LbpA loops on the TbpB C-lobe was done using SOE PCR as in examples 6 and 7, and sequence analysis confirmed the insertion of the MC58 LbpA helix 3 and loop 2 in the loopless M982 TbpB C-lobe. The design of the hybrid protein involved insertion of 15 amino acids from the LbpA helix 3 region (protein sequence: 383-YGTDEAEKFRDKSGV) into the loop 18 region of M982 C-lobe (SEQ.ID NO:166), and the insertion of 11 amino acids from the LbpA loop 2 region (protein sequence: LNRWVKERIEQL) into the loop 21 region of M982 C-lobe (SEQ.ID NO:164) (FIG. 20>, Panel B).

[0296] The methods for transformation of the recombinant plasmid and performing preliminary expression trials are as described for Example 7. The preliminary screen demonstrated that the yields of recombinant protein were high (bottom left, Panel B, FIG. 20), comparable or better than results with the native C-lobe or loopless C-lobe used as the scaffold (data not shown). Clearly the results further demonstrate that insertion of the foreign protein segments did not substantially affect the stability of the engineered C-lobe, suggesting that the foreign segments did not interfere with the normal folding of the core structural elements of the C-lobe.

### Example 9

### Engineering a Loop for Conjugate Capsular Vaccine Applications Using the TbpB C-Lobe of H. influenzae

[0297] The majority of the conjugate capsular vaccines that have been developed to date have used one of the toxin-based vaccine components as a carrier for conjugating the polysaccharide capsular material. There are several disadvantages to the strategy of conjugating the capsular polysaccharide to the tetanus or diphtheria toxin or toxoid. One is the potential for negatively influencing the induction of an effective immune response due to the continued exposure to the carrier proteins that are also present in vaccines used in routine immunizations; the development of immune tolerance. The second is that the carrier is not relevant to the natural exposure to the pathogen, thus will not fully take advantage of invoking the most relevant T-cell help when the pathogen is encountered.

[0298] Conjugate capsular vaccines have been very successful at preventing infection, and in fact preventing colonization, by the bacterial pathogens that express the specific capsular polysaccharide, normally referred to as the serotype or serogroup. However, there is essentially no cross-protection for bacteria expressing other polysaccharide capsular types, which can eventually lead to disease being caused by strains expressing polysaccharides not covered by the vaccine. The resulting need to expand the spectrum of polysaccharide capsular types covered by the conjugate capsular vaccines has led to the prospect of continual development of expanded spectrum vaccines and to the view that the ultimate solution lies with protein-based vaccines that are capable of providing substantial cross-protection. However, if a protein-based vaccine capable of inducing broad cross-protection was developed it is unlikely that it would be accepted to replace the existing conjugate capsular vaccines. The addition of yet another vaccine to the already crowed routine immunization schedule could be viewed as potential barrier to introduction of protein-based vaccines.

[0299] In this example we have engineered a conjugation loop into a TbpB C-lobe from H. influenzae that contains 42 lysine residues, substantially exceeding the total number of lysines in the remainder of the TbpB C-lobe, lysine residues, which would be predicted to minimize modification of lysines in critical epitopes since only those lysines reacting with the activated carbohydrate moieties would be modified and the ratio of carbohydrate to protein can be controlled during the conjugation process.

[0300] The sequence of the gene encoding the engineered H. influenzae TbpB C-lobe from strain H36 is illustrated Panel A of FIG. 21 with the DNA region encoding the conjugation loop indicated by an increased font size (14 vs 12) (SEQ.ID NO: 167). The site of insertion and the sequence of the conjugation loop was designed using the large negatively charged loop in LbpB from N. meningitidis strain MC58 as a model (59). Essentially the sequence of the LbpB loop was used as a template and lysines were used to replace the aspartic or glutamic acid residues in the loop. The conjugation loop was engineered onto the handle domain of the TbpB C-lobe in between beta-strands 22 and 23, in the position of loop 23 (FIG. 2). The location of the loop is illustrated in Panel B of FIG. 21 using a structural model for the H. influenzae C-lobe generated with a much smaller loop (comprised of 11 amino acids) replacing loop 23. The inserted residues are illustrated as space filled spheres. The engineered loop is actually comprised of 91 amino acids that constitute over ¼ of the size of the overall C-lobe (352 amino acid residues) and the loop is set forth as highlighted residues in the entire C-lobe with the engineered loop is set forth in SEQ.ID NO: 205. This shows that the loop domain can accommodate a large number of additional amino acids.

[0301] The inclusion of a conjugation region would not be restricted to insertion into the loop regions of the N-lobe or C-lobe but for instance could be provided by including a cluster of lysine residues at the N-terminus of the intact TbpB or TbpB lobes.

### Example 10

### Producing Amino Acid Substitutions in Surface Binding Loops of TbpB and Evaluating their Tf Binding Properties

[0302] A series of site-directed mutants in the surface loops of the TbpB protein were constructed to explore their impact on functional and immunological properties. In order to target surface exposed amino acids for modification, site-directed mutations were made in TbpBs for which we had the x-ray crystallography derived structures (12, 13). A splicing by overlap extension polymerase chain reaction (SOE PCR) approach was used to introduce mutations into genes encoding truncated TbpB proteins derived from the porcine pathogens A. pleuropneumoniae, A. suis and H, parasuis. They included A. pleuropneumoniae TbpB²⁰⁻⁵²⁸ (amino acid 20-528) derived from strain H49 (ApH49 TbpB, SEQ.ID NO: 2), and a F171A mutant of ApH49 TbpB²⁰⁻⁵²⁸ (SEQ ID.NO: 4). Also included were A. pleuropneumoniae TbpB²⁶⁻⁵²⁸ (amino acid 26-528) derived from strain H87 (ApH87 TbpB, SEQ.ID NO:12) and a Y95A mutant (SEQ.ID NO: 14), a Y121A mutant (SEQ.ID NO: 16), a Y174A mutant (SEQ.ID NO: 18) and a R179E mutant (SEQ.ID NO: 20). A. suis TbpB²⁷⁻⁵⁷⁷ (amino acid 27-577) derived from strain H57 (AsH57 TbpB, SEQ.ID NO: 28), a F63A mutant (SEQ.ID NO: 30) and a F152A mutant (SEQ ID NO:32) were also produced. Finally, H. parasuis TbpB²⁷⁻⁵⁷⁷ (amino acid 27-577) derived from the Nagasaki strain Hp5 (Hp5 TbpB, SEQ.ID NO: 115), a Y93A mutant (SEQ.ID NO: 170), a Y117A mutant (SEQ.ID NO: 172), a Y167A mutant (SEQ.ID NO: 174), and a W176A mutant (SEQ.ID NO: 176) were also prepared.

[0303] The recombinant proteins were initially produced with an N-terminal fusion partner containing a poly-histidine tag, a maltose binding protein and a TEV protease cleavage site. This enabled us to isolate recombinant protein suitable for a solid-phase binding assay using a nitrocellulose membrane and enzymatically labeled porcine transferrin or by capturing recombinant fusion protein from crude extracts with a porcine-Sepharose affinity resin (13). Using these assays, strong binding to by the native TbpBs was readily observed, whereas there was reduced binding by many of the site-directed mutants.

[0304] Although it is possible to derive semi-quantitative binding constants for binding of porcine Tf from these experiments we opted to utilize a variety of different biophysical and biochemical approaches to obtain more accurate and quantitative measures of the binding affinity. As shown in FIG. 22, using isothermal calorimetry, surface plasmon resonance or biolayer interferometry (23-25) the affinity constant (Kd) for native TbpBs were generally in the 20 to 60 nM range, with the exception of the TbpB from Actinobacillus suis for which the binding kinetics were somewhat unique and had an estimated Kd of 120 nM (12).

[0305] Several of the mutations resulted in a 100 fold increase in the affinity constant (Kd), such as the F171A mutation in the TbpB from A. pleuropneumoniae strain H49, the Y174A mutation in the TbpB from A. pleuropneumoniae strain H49 or the Y167A or W176A mutations in the TbpB from H. parasuis strain HP5. It is interesting to note that these mutants all map to loop 8.

### Example 11

### Evaluating the Immunological Properties of Derivatives of TbpB with Amino Acid Substitutions in Surface Binding Loops

[0306] In order to test the immunological properties of the mutant proteins derived from TbpB that were defective in binding Tf it was important to test them in the native host, and preferably directly test their ability to protect the host from infection by the targeted pathogen. Thus experiments were initiated in a well-established infection model for Haemophilus parasuis in which colostrum-deprived piglets were immunized starting at 28 days after birth and challenged with Haemophilus parasuis at day 63 (37, 60). In this infection model a commercial vaccine derived from the challenge strain (Porcillis Glasser) provided complete protection from death and recombinant forms of transferrin receptors had previously provided 20-30% survival 15 days post-challenge.

[0307] Groups of five or six pigs were immunized with recombinant intact TbpB from the Hp5 challenge strain, the site-directed Y167A TbpB protein, the Porcillis Glasser vaccine or adjuvant alone. The pigs were challenged with the standard 10⁸ challenge dose of H. parasuis Hp5 (Nagasaki) strain and monitored for a 15 day period. As illustrated in FIG. 23, only 1 out of five pigs immunized with the control Porcilis Glasser vaccine survived the challenge suggesting that a more virulent variant of the Hp5 strain was used in this experiment. Follow up experiments with isolates of the strain from infected pigs had lower survival rates, supporting this conclusion. In spite of the enhanced virulence of the challenge strain, all six pigs immunized with the Y167A TbpB survived 15 days, and 5 out of the 6 pigs had little or no symptoms and there was little or no pathology observed on necropsy. This level of protection was contrasted with the six pigs immunized with the wild-type protein, in which only 3 pigs survived the challenge. The 3 surviving pigs had significant clinical symptoms after challenge and showed marked pathology upon necropsy. In summary, this experiment illustrated that the Y167A TbpB mutant protein induced a superior protective immunological response compared to the wild-type protein, and since the two proteins are virtually identical except for the transferrin binding properties (FIG. 22), the suboptimal immune response by the native protein can be attributed to binding of host transferrin.

[0308] To provide further evidence of the impact that the mutation had on the immune response the B-cell and T-cell responses were evaluated. Blood samples taken immediately prior to challenge (after two immunizations) and at 96 hours after challenge were analyzed for the adaptive immune response. The samples were evaluated by FACS analysis for mature B cell (αIgM⁺CD21⁺) and T helper cell (CD4⁺CD8α⁻) subsets. The results in FIG. 24 demonstrate that prior to challenge the Y167A mutant TbpB antigen had induced a stronger B-cell response (Panel A) and T helper cell response (Panel B) than the native TbpB antigen or the commercial Porcilis Glasser vaccine. At 96 hours after challenge the response to the mutant TbpB (51.48%±1.18%) was significantly higher than the response to the native TbpB (45.65%±1.20%) or PG vaccine (44.83%±1.59%) (FIG. 24, Panel C). A similar tendency was observed in the T helper cell response, however, the difference in the percentage between the three groups was less evident (FIG. 24, Panel D). However there were only 3/6 and 2/5 surviving pigs left in the groups immunized with native TbpB or the Porcilis Glasser vaccine after 96 hours, and since the low responders were the ones tending to die earlier, the observed differences between the groups at the 96 hr time point are actually an underestimate.

### Example 12

### An Immune Response Directed Against Derivatives of TbpB is Capable of Preventing Colonization

[0309] Although infection models do provide the opportunity to evaluate the potential efficacy of vaccines, they rarely emulate the natural infectious process, in which transmission of the pathogen normally leads to colonization of the host upper respiratory tract prior to establishment of infection. The conjugate capsular vaccines designed to prevent meningitis, pneumonia and invasive infection have been shown to eliminate the targeted bacteria from the upper respiratory tract (17), providing the additional advantage of herd immunity protecting non-immunized individuals. The ability to prevent colonization has since become an important feature for making decisions on vaccine implementation (18). Thus it may be prudent to design vaccines that prevent colonization so that along with preventing infection they can eliminate the reservoir of disease-causing pathogens.

[0310] Taking advantage of prior studies characterizing the interaction of N. meningitidis and human CEACAM receptors (61), we developed a transgenic humanized mouse model capable of supporting colonization by Neisseria meningitidis (62). This model is based on a specific interaction of Neisseria meningitidis Opa proteins with the human CEACAM1 receptor, and could potentially be extended to other pathogens that naturally or artificially exploit this interaction. Immunization of the transgenic mice with a meningococcal group C conjugate capsular vaccine resulted in sterilizing mucosal immunity in the colonization model, or in other words, prevented colonization by group C Neisseria meningitidis but not strains with other capsular types.

[0311] This model was used to test the ability of TbpB and its derivatives to prevent colonization by N. meningitidis. Since there is no human transferrin present in these mice during the immunization stage, it was not necessary to use an engineered non-binding TbpB as was described in Example 11. As illustrated in FIG. 25A, 8 out of 9 mice immunized with recombinant truncated TbpB did not have detectable levels of N. meningitidis three days after an intranasal challenge with 1×10⁷ CFU of N. meningitidis strain M982. In the control mice treated with adjuvant alone, 6 out of 8 mice had detectable levels of N. meningitidis present. It is salient to mention that this is first protein antigen shown to be capable of preventing colonization and this feature cannot be assumed to be common to surface protein antigens due to our limited understanding of the mechanisms involved.

[0312] In a follow up experiment we compared TbpB to another surface lipoprotein, factor H binding protein, which is a key component in two vaccines, and to the individual TbpB subdomains. As illustrated in FIG. 25B the C-lobe was capable of preventing colonization as well as or better than the intact TbpB or TbpB N-lobe, which in turn were as effective or more effective than factor H binding protein at inducing sterilizing immunity in this experiment. The ability of the TbpB C-lobe to induce sterilizing mucosal immunity with systemic immunization is a particularly encouraging finding as its lack of Tf binding means that it will be equally effective in the native host, and its enhanced ability to induce a cross-reactive immune response (FIG. 3, FIG. 11) will facilitate the development of broadly cross-protective vaccines.

[0313] The colonization studies were performed as described previously (62). Groups of 8 or more C57/B16 expressing the human CEACAM-1 transgene (bred in-house) received 100 ul of designated immunizations subcutaneously on days 0 and 21. Groups received either the designated protein (25 ug) or no protein control adjuvanted with 20% Emulsigen D (MVP Laboratories) diluted in sterile phosphate buffered saline (PBS) (Gibco) to a volume of 100 ul per injection.

[0314] On day 35, mice were anesthetized with Isofluran (Baxter) and inoculated via intranasal instillation with the twice animal passaged N. meningitidis strain M982. To prepare inoculums, bacterial strains for infection were grown overnight on GC agar (Beckton Dickinson); the overnight lawn of growth was harvested into 1 ml of PBS containing 1 mM of MgCl2 (PBS/Mg) and OD600 was measured to adjust the number of bacteria. Cultures were adjusted such that each final 10 μl inoculum contained approximately 1×10⁷ colony forming units. Density of colonization dose was confirmed via serial dilution plating on GC agar.

[0315] Three days after infection (day 38), mice were euthanized by carbon dioxide asphyxiation. Burden of colonization was assessed by tracheal lavage with 250 ul PBS/Mg followed by direct swabbing of the nasal passages with a polyester tipped applicator (Puritan Medical Products) resuspended in 500 ul PBS/Mg. Samples were enumerated after overnight growth on GC agar supplemented with VCNT inhibitor (Becton Dickinson) to prevent growth of nasal flora. Animal experiments were conducted in accordance with the Animal Ethics Review Committee of the University of Toronto.

### Example 13

### Vaccine Formulation Comprising Mixtures of TbpBs or Portions Thereof

[0316] Since the pathogens that possess TbpB reside exclusively in their specific host (humans, pigs, cattle and/or related ruminants) and since TbpB is capable of preventing colonization (FIG. 25), a broadly cross-protective vaccine based on engineered antigens targeting TbpB has the potential of eliminating the pathogen.

[0317] In order to broaden the efficacy of a vaccine formulation against a spectrum of Gram-negative pathogens, TbpBs, or portions thereof, e.g. a C-lobe domain, obtained from different bacterial species or strains may be combined. In this Example we provide preferred combinations of TbpB polypeptides or combinations thereof for use in the preparation of vaccine formulations.

[0318] One important consideration in identifying efficacious combinations of TbpB polypeptides is the extent to which different strains, species and genera are capable of readily exchanging the tbpB genes, thus acting as a potential reservoir for TbpB variants not covered by the vaccine. One of the important factors influencing the horizontal exchange of tbpB genes is the nature of the uptake signal sequence (USS) that is inherently present in these naturally transformable species (63, 64). These bacteria preferentially take up DNA containing the specific USS and incorporate it into their genome, providing a very efficient mechanism for incorporating antigenic variants of their surface antigens.

[0319] In the case of Neisseria meningitidis we have an extensive strain collection that adequately represented the overall sequence diversity (FIG. 10A). There is a particularly large collection of sequences from around the world available on public databases for this pathogen that represents a very comprehensive appreciation of sequence diversity. Since the other human pathogens that possess TbpBs and normally reside in the human upper respiratory tract (Haemophilus influenzae, Moraxella catarrhalis) do not contain the USS specific to Neisseria in their genomic DNA, they do not constitute a ready reservoir for antigen variants. Thus the present example includes a vaccine formulation comprising a combination of engineered TbpB antigens, comprising at least two TbpB polypeptides, or a portion thereof (e.g. the C-lobe domain) obtained from Neisseria meningitidis strains selected from two different phylogenetic clusters set forth in FIG. 10A. Such vaccine formulation is potentially capable of inducing a cross-reactive (FIG. 11) and cross-protective antibody response, could potentially be used to eliminate N. meningitidis from the human population.

[0320] The related pathogen, N. gonorrhoeae, that normally resides in the human genitourinary tract shares the same USS thus could potentially serve as a reserve for antigenic variation due to the occasional presence of these two species on the same mucosal surface. However, analysis of the sequence diversity of the gonococcal TbpBs relative to diversity in N. meningitidis (FIG. 26A) indicates that they are largely a subset of the sequence diversity present in N. meningitidis leading to the prospect that by a slight extension of our approach a set of engineered antigens could be used for a vaccine potentially capable of eliminating colonization by either pathogen. For engineered C-lobes (FIG. 26B) it would involve inclusion of C-lobes specifically targeting N. gonorrhoeae TbpB variants. The presence of TbpB in some of the commensal Neisseria isolates represents another potential reservoir for antigenic variants, thus extension of our approach to include representative variants from commensal Neisseria might be necessary to effectively eliminate TbpB expressing Neisseria capable of causing disease. Thus the present example includes a vaccine formulation comprising a combination of engineered TbpB antigens, comprising a Neisseria meningitidis TbpB polypeptide, or a portion thereof (e.g. a C-lobe domain), and a Neisseria gonorrhoeae TbpB polypeptide or a portion thereof (e.g. a C-lobe domain).

[0321] The porcine pathogens A. pleuropneumoniae, A. suis and H. parasuis share the same USS and, as a consequence, the TbpB sequence diversity is distributed amongst the three species (FIG. 4) such that the main phylogenetic clusters have representatives from at least two species. Thus it is important to consider the overall TbpB sequence variation in all three species when developing TbpB-based vaccines against these pathogens. This is the foundation for our rather unconventional approach of developing engineered antigens capable of inducing an immune response against antigens from more that one species (FIG. 6, FIG. 7), and since TbpB is capable of preventing colonization, are using an approach that could be used to eliminate all three pathogens from their porcine host. Thus the present example includes a vaccine formulation comprising a combination of engineered TbpB antigens, comprising at least two TbpB polypeptides, or a portion thereof (e.g. a C-lobe domain) obtained from Actinobacillus pleuropneumoniae, Actinobacillus suis and Haemophilus parasuis.

[0322] In regards to Haemophilus influenzae, the distinctly different spectrum of disease caused by the strains possessing the type b polysaccharide capsule and the non-typeable strains that lack a polysaccharide capsule have prompted focus on vaccines that target each group separately. Recent increases in invasive disease due to strains expressing the group A polysaccharide capsule has prompted consideration for development of vaccines targeting group A strains (65). An evaluation of TbpB diversity in strains of H. influenzae indicates that there are three major phylogenetic clusters (FIG. 27A) with the non-typeable strains distributed amongst all three groups. Since all strains of H. influenzae share the same USS, it is likely that the distribution of TbpB diversity will not be impacted by capsular type, and the development of a cross-protective vaccine derived from TbpB-based engineered antigens will effectively target type b strains, non-typeable strains and strains expressing other capsular types. Thus our approach should facilitate the development of a broadly-protective TbpB-based vaccine for H. influenzae as a stand-alone vaccine, or as a carrier for a conjugate capsular vaccines (FIG. 21). Thus the present example includes a vaccine formulation comprising a combination of engineered TbpB antigens, comprising at least two TbpB polypeptides, obtained from H. influenzae strains selected from two different phylogenetic clusters set forth in FIG. 27A.

[0323] Unlike Neisseria meningitidis and Haemophilus influenzae, there are no obvious USSs present in the genomes of Moraxella catarrhalis strains, yet they are naturally transformable with a strong preference for M. catarrhalis DNA. Thus development of a broadly cross-protective vaccine against M. catarrhalis with engineered antigens targeting TbpB need only consider the diversity of TbpBs from M. catarrhalis (FIG. 29). Antigens derived from strains constituting the three major groups should be sufficient to induce a broadly cross-protective vaccine capable of preventing colonization by M. catarrhalis. Thus the present example includes a vaccine formulation comprising a combination of engineered TbpB antigens, comprising at least two TbpB polypeptides, obtained from M. catharrhalis strains selected from two different phylogenetic clusters set forth in FIG. 29.

[0324] The bovine pathogen Mannhemia haemolytica, formerly known as Pasteurella haemolytica, is major cause of bovine respiratory disease (shipping fever) in cattle and respiratory infections in sheep. The sheep pathogen, Pasteurella trehalosi, that has been reclassified into two species Mannhemia glucosida and Bibersteinia trehalosi, shares USSs with Mannhemia haemolytica. This may be largely responsible for the finding that these species share a common gene pool (66). In contrast the bovine pathogen, Histophilus somni, formerly known as Haemophilus somnus, has a distinct USS, thus is not a reservoir of antigenic variants for M. haemolytica. There are three main phylogenetic lineages of TbpBs from M. haemolytica, M. glucosida and B. trehalosi that obviously encompass pathogens of sheep and cattle (66) (FIG. 28) with clusters of variants that are primarily restricted to cattle or sheep. Thus it will be possible to consider development of TbpB-derived engineered antigens targeting disease in cattle, in sheep or in both ruminant species. Thus the present example includes a vaccine formulation comprising a combination of engineered TbpB antigens, or a portion thereof e.g. the C-lobe domain, comprising at least two TbpB polypeptides, obtained from Mannheimia haemolytica, Mannheimia glucosida and Bibersteinia trehalosi strains selected from two different phylogenetic clusters set forth in FIG. 28.

[0325] All publications, patents and patent applications are herein incorporated by reference in their entirety to the same extent as if each individual publication, patent or patent application was specifically and individually indicated to be incorporated by reference in its entirety.

TABLE 1
Modification of 1 loop

| | |
|---|---|
| L1 | ✓ |
| L2 | ✓ |
| L3 | ✓ |
| L4 | ✓ |
| L5 | ✓ |
| L6 | ✓ |
| L7 | ✓ |
| L8 | ✓ |
| L9 | ✓ |
| L10 | ✓ |
| L11 | ✓ |
| L12 | ✓ |
| L13 | ✓ |
| L14 | ✓ |
| L15 | ✓ |
| L16 | ✓ |
| L17 | ✓ |
| L18 | ✓ |
| L19 | ✓ |
| L20 | ✓ |
| L21 | ✓ |
| L22 | ✓ |
| L23 | ✓ |
| L24 | ✓ |
| L25 | ✓ |
| L26 | ✓ |
| L27 | ✓ |
| L28 | ✓ |
| L29 | ✓ |
| L30 | ✓ |
| L31 | ✓ |
| L32 | ✓ |

TABLE 2
Modification of 2 loops

| | L1 | L2 | L3 | L4 | L5 | L6 | L7 | L8 | L9 | L10 | L11 | L12 | L13 | L14 | L15 | L16 | L17 | L18 |
|---|---|---|---|---|---|---|---|---|---|---|---|---|---|---|---|---|---|---|
| L1 | x | | | | | | | | | | | | | | | | | |
| L2 | ✓ | x | | | | | | | | | | | | | | | | |
| L3 | ✓ | ✓ | x | | | | | | | | | | | | | | | |
| L4 | ✓ | ✓ | ✓ | x | | | | | | | | | | | | | | |
| L5 | ✓ | ✓ | ✓ | ✓ | x | | | | | | | | | | | | | |
| L6 | ✓ | ✓ | ✓ | ✓ | ✓ | x | | | | | | | | | | | | |
| L7 | ✓ | ✓ | ✓ | ✓ | ✓ | ✓ | x | | | | | | | | | | | |
| L8 | ✓ | ✓ | ✓ | ✓ | ✓ | ✓ | ✓ | x | | | | | | | | | | |
| L9 | ✓ | ✓ | ✓ | ✓ | ✓ | ✓ | ✓ | ✓ | x | | | | | | | | | |
| L10 | ✓ | ✓ | ✓ | ✓ | ✓ | ✓ | ✓ | ✓ | ✓ | x | | | | | | | | |
| L11 | ✓ | ✓ | ✓ | ✓ | ✓ | ✓ | ✓ | ✓ | ✓ | ✓ | x | | | | | | | |
| L12 | ✓ | ✓ | ✓ | ✓ | ✓ | ✓ | ✓ | ✓ | ✓ | ✓ | ✓ | x | | | | | | |
| L13 | ✓ | ✓ | ✓ | ✓ | ✓ | ✓ | ✓ | ✓ | ✓ | ✓ | ✓ | ✓ | x | | | | | |
| L14 | ✓ | ✓ | ✓ | ✓ | ✓ | ✓ | ✓ | ✓ | ✓ | ✓ | ✓ | ✓ | ✓ | x | | | | |
| L15 | ✓ | ✓ | ✓ | ✓ | ✓ | ✓ | ✓ | ✓ | ✓ | ✓ | ✓ | ✓ | ✓ | ✓ | x | | | |
| L16 | ✓ | ✓ | ✓ | ✓ | ✓ | ✓ | ✓ | ✓ | ✓ | ✓ | ✓ | ✓ | ✓ | ✓ | ✓ | x | | |
| L17 | ✓ | ✓ | ✓ | ✓ | ✓ | ✓ | ✓ | ✓ | ✓ | ✓ | ✓ | ✓ | ✓ | ✓ | ✓ | ✓ | x | |
| L18 | ✓ | ✓ | ✓ | ✓ | ✓ | ✓ | ✓ | ✓ | ✓ | ✓ | ✓ | ✓ | ✓ | ✓ | ✓ | ✓ | ✓ | x |
| L19 | ✓ | ✓ | ✓ | ✓ | ✓ | ✓ | ✓ | ✓ | ✓ | ✓ | ✓ | ✓ | ✓ | ✓ | ✓ | ✓ | ✓ | ✓ |
| L20 | ✓ | ✓ | ✓ | ✓ | ✓ | ✓ | ✓ | ✓ | ✓ | ✓ | ✓ | ✓ | ✓ | ✓ | ✓ | ✓ | ✓ | ✓ |
| L21 | ✓ | ✓ | ✓ | ✓ | ✓ | ✓ | ✓ | ✓ | ✓ | ✓ | ✓ | ✓ | ✓ | ✓ | ✓ | ✓ | ✓ | ✓ |
| L22 | ✓ | ✓ | ✓ | ✓ | ✓ | ✓ | ✓ | ✓ | ✓ | ✓ | ✓ | ✓ | ✓ | ✓ | ✓ | ✓ | ✓ | ✓ |
| L23 | ✓ | ✓ | ✓ | ✓ | ✓ | ✓ | ✓ | ✓ | ✓ | ✓ | ✓ | ✓ | ✓ | ✓ | ✓ | ✓ | ✓ | ✓ |
| L24 | ✓ | ✓ | ✓ | ✓ | ✓ | ✓ | ✓ | ✓ | ✓ | ✓ | ✓ | ✓ | ✓ | ✓ | ✓ | ✓ | ✓ | ✓ |
| L25 | ✓ | ✓ | ✓ | ✓ | ✓ | ✓ | ✓ | ✓ | ✓ | ✓ | ✓ | ✓ | ✓ | ✓ | ✓ | ✓ | ✓ | ✓ |
| L26 | ✓ | ✓ | ✓ | ✓ | ✓ | ✓ | ✓ | ✓ | ✓ | ✓ | ✓ | ✓ | ✓ | ✓ | ✓ | ✓ | ✓ | ✓ |
| L27 | ✓ | ✓ | ✓ | ✓ | ✓ | ✓ | ✓ | ✓ | ✓ | ✓ | ✓ | ✓ | ✓ | ✓ | ✓ | ✓ | ✓ | ✓ |
| L28 | ✓ | ✓ | ✓ | ✓ | ✓ | ✓ | ✓ | ✓ | ✓ | ✓ | ✓ | ✓ | ✓ | ✓ | ✓ | ✓ | ✓ | ✓ |
| L29 | ✓ | ✓ | ✓ | ✓ | ✓ | ✓ | ✓ | ✓ | ✓ | ✓ | ✓ | ✓ | ✓ | ✓ | ✓ | ✓ | ✓ | ✓ |
| L30 | ✓ | ✓ | ✓ | ✓ | ✓ | ✓ | ✓ | ✓ | ✓ | ✓ | ✓ | ✓ | ✓ | ✓ | ✓ | ✓ | ✓ | ✓ |
| L31 | ✓ | ✓ | ✓ | ✓ | ✓ | ✓ | ✓ | ✓ | ✓ | ✓ | ✓ | ✓ | ✓ | ✓ | ✓ | ✓ | ✓ | ✓ |
| L32 | ✓ | ✓ | ✓ | ✓ | ✓ | ✓ | ✓ | ✓ | ✓ | ✓ | ✓ | ✓ | ✓ | ✓ | ✓ | ✓ | ✓ | ✓ |

| | L19 | L20 | L21 | L22 | L23 | L24 | L25 | L26 | L27 | L28 | L29 | L30 | L31 | L32 |
|---|---|---|---|---|---|---|---|---|---|---|---|---|---|---|
| L1 | | | | | | | | | | | | | | |
| L2 | | | | | | | | | | | | | | |
| L3 | | | | | | | | | | | | | | |
| L4 | | | | | | | | | | | | | | |
| L5 | | | | | | | | | | | | | | |
| L6 | | | | | | | | | | | | | | |
| L7 | | | | | | | | | | | | | | |
| L8 | | | | | | | | | | | | | | |
| L9 | | | | | | | | | | | | | | |
| L10 | | | | | | | | | | | | | | |
| L11 | | | | | | | | | | | | | | |
| L12 | | | | | | | | | | | | | | |
| L13 | | | | | | | | | | | | | | |
| L14 | | | | | | | | | | | | | | |
| L15 | | | | | | | | | | | | | | |
| L16 | | | | | | | | | | | | | | |
| L17 | | | | | | | | | | | | | | |
| L18 | | | | | | | | | | | | | | |
| L19 | x | | | | | | | | | | | | | |
| L20 | ✓ | x | | | | | | | | | | | | |
| L21 | ✓ | ✓ | x | | | | | | | | | | | |
| L22 | ✓ | ✓ | ✓ | x | | | | | | | | | | |
| L23 | ✓ | ✓ | ✓ | ✓ | x | | | | | | | | | |
| L24 | ✓ | ✓ | ✓ | ✓ | ✓ | x | | | | | | | | |
| L25 | ✓ | ✓ | ✓ | ✓ | ✓ | ✓ | x | | | | | | | |
| L26 | ✓ | ✓ | ✓ | ✓ | ✓ | ✓ | ✓ | x | | | | | | |
| L27 | ✓ | ✓ | ✓ | ✓ | ✓ | ✓ | ✓ | ✓ | x | | | | | |
| L28 | ✓ | ✓ | ✓ | ✓ | ✓ | ✓ | ✓ | ✓ | ✓ | x | | | | |
| L29 | ✓ | ✓ | ✓ | ✓ | ✓ | ✓ | ✓ | ✓ | ✓ | ✓ | x | | | |
| L30 | ✓ | ✓ | ✓ | ✓ | ✓ | ✓ | ✓ | ✓ | ✓ | ✓ | ✓ | x | | |
| L31 | ✓ | ✓ | ✓ | ✓ | ✓ | ✓ | ✓ | ✓ | ✓ | ✓ | ✓ | ✓ | x | |
| L32 | ✓ | ✓ | ✓ | ✓ | ✓ | ✓ | ✓ | ✓ | ✓ | ✓ | ✓ | ✓ | ✓ | x |

TABLE 3
Modification of 3 loops

| | L1 | L2 | L3 | L4 | L5 | L6 | L7 | L8 | L9 | L10 | L11 | L12 | L13 | L14 | L15 | L16 | L17 | L18 |
|---|---|---|---|---|---|---|---|---|---|---|---|---|---|---|---|---|---|---|
| L1 + L2 | x | x | | | | | | | | | | | | | | | | |
| L1 + L3 | x | ✓ | x | | | | | | | | | | | | | | | |
| L1 + L4 | x | ✓ | ✓ | x | | | | | | | | | | | | | | |
| L1 + L5 | x | ✓ | ✓ | ✓ | x | | | | | | | | | | | | | |
| L1 + L6 | x | ✓ | ✓ | ✓ | ✓ | x | | | | | | | | | | | | |
| L1 + L7 | x | ✓ | ✓ | ✓ | ✓ | ✓ | x | | | | | | | | | | | |
| L1 + L8 | x | ✓ | ✓ | ✓ | ✓ | ✓ | ✓ | x | | | | | | | | | | |
| L1 + L9 | x | ✓ | ✓ | ✓ | ✓ | ✓ | ✓ | ✓ | x | | | | | | | | | |
| L1 + L10 | x | ✓ | ✓ | ✓ | ✓ | ✓ | ✓ | ✓ | ✓ | x | | | | | | | | |
| L1 + L11 | x | ✓ | ✓ | ✓ | ✓ | ✓ | ✓ | ✓ | ✓ | ✓ | x | | | | | | | |
| L1 + L12 | x | ✓ | ✓ | ✓ | ✓ | ✓ | ✓ | ✓ | ✓ | ✓ | ✓ | x | | | | | | |
| L1 + L13 | x | ✓ | ✓ | ✓ | ✓ | ✓ | ✓ | ✓ | ✓ | ✓ | ✓ | ✓ | x | | | | | |
| L1 + L14 | x | ✓ | ✓ | ✓ | ✓ | ✓ | ✓ | ✓ | ✓ | ✓ | ✓ | ✓ | ✓ | x | | | | |
| L1 + L15 | x | ✓ | ✓ | ✓ | ✓ | ✓ | ✓ | ✓ | ✓ | ✓ | ✓ | ✓ | ✓ | ✓ | x | | | |
| L1 + L16 | x | ✓ | ✓ | ✓ | ✓ | ✓ | ✓ | ✓ | ✓ | ✓ | ✓ | ✓ | ✓ | ✓ | ✓ | x | | |
| L1 + L17 | x | ✓ | ✓ | ✓ | ✓ | ✓ | ✓ | ✓ | ✓ | ✓ | ✓ | ✓ | ✓ | ✓ | ✓ | ✓ | x | |
| L1 + L18 | x | ✓ | ✓ | ✓ | ✓ | ✓ | ✓ | ✓ | ✓ | ✓ | ✓ | ✓ | ✓ | ✓ | ✓ | ✓ | ✓ | x |
| L1 + L19 | x | ✓ | ✓ | ✓ | ✓ | ✓ | ✓ | ✓ | ✓ | ✓ | ✓ | ✓ | ✓ | ✓ | ✓ | ✓ | ✓ | ✓ |
| L1 + L20 | x | ✓ | ✓ | ✓ | ✓ | ✓ | ✓ | ✓ | ✓ | ✓ | ✓ | ✓ | ✓ | ✓ | ✓ | ✓ | ✓ | ✓ |
| L1 + L21 | x | ✓ | ✓ | ✓ | ✓ | ✓ | ✓ | ✓ | ✓ | ✓ | ✓ | ✓ | ✓ | ✓ | ✓ | ✓ | ✓ | ✓ |
| L1 + L22 | x | ✓ | ✓ | ✓ | ✓ | ✓ | ✓ | ✓ | ✓ | ✓ | ✓ | ✓ | ✓ | ✓ | ✓ | ✓ | ✓ | ✓ |
| L1 + L23 | x | ✓ | ✓ | ✓ | ✓ | ✓ | ✓ | ✓ | ✓ | ✓ | ✓ | ✓ | ✓ | ✓ | ✓ | ✓ | ✓ | ✓ |
| L1 + L24 | x | ✓ | ✓ | ✓ | ✓ | ✓ | ✓ | ✓ | ✓ | ✓ | ✓ | ✓ | ✓ | ✓ | ✓ | ✓ | ✓ | ✓ |
| L1 + L25 | x | ✓ | ✓ | ✓ | ✓ | ✓ | ✓ | ✓ | ✓ | ✓ | ✓ | ✓ | ✓ | ✓ | ✓ | ✓ | ✓ | ✓ |
| L1 + L26 | x | ✓ | ✓ | ✓ | ✓ | ✓ | ✓ | ✓ | ✓ | ✓ | ✓ | ✓ | ✓ | ✓ | ✓ | ✓ | ✓ | ✓ |
| L1 + L27 | x | ✓ | ✓ | ✓ | ✓ | ✓ | ✓ | ✓ | ✓ | ✓ | ✓ | ✓ | ✓ | ✓ | ✓ | ✓ | ✓ | ✓ |
| L1 + L28 | x | ✓ | ✓ | ✓ | ✓ | ✓ | ✓ | ✓ | ✓ | ✓ | ✓ | ✓ | ✓ | ✓ | ✓ | ✓ | ✓ | ✓ |
| L1 + L29 | x | ✓ | ✓ | ✓ | ✓ | ✓ | ✓ | ✓ | ✓ | ✓ | ✓ | ✓ | ✓ | ✓ | ✓ | ✓ | ✓ | ✓ |
| L1 + L30 | x | ✓ | ✓ | ✓ | ✓ | ✓ | ✓ | ✓ | ✓ | ✓ | ✓ | ✓ | ✓ | ✓ | ✓ | ✓ | ✓ | ✓ |
| L1 + L31 | x | ✓ | ✓ | ✓ | ✓ | ✓ | ✓ | ✓ | ✓ | ✓ | ✓ | ✓ | ✓ | ✓ | ✓ | ✓ | ✓ | ✓ |
| L1 + L32 | x | ✓ | ✓ | ✓ | ✓ | ✓ | ✓ | ✓ | ✓ | ✓ | ✓ | ✓ | ✓ | ✓ | ✓ | ✓ | ✓ | ✓ |
| L2 + L3 | | x | x | | | | | | | | | | | | | | | |
| L2 + L4 | | x | ✓ | x | | | | | | | | | | | | | | |
| L2 + L3 | | x | ✓ | ✓ | x | | | | | | | | | | | | | |
| L2 + L6 | | x | ✓ | ✓ | ✓ | x | | | | | | | | | | | | |
| L2 + L7 | | x | ✓ | ✓ | ✓ | ✓ | x | | | | | | | | | | | |
| L2 + L8 | | x | ✓ | ✓ | ✓ | ✓ | ✓ | x | | | | | | | | | | |
| L2 + L9 | | x | ✓ | ✓ | ✓ | ✓ | ✓ | ✓ | x | | | | | | | | | |
| L2 + L10 | | x | ✓ | ✓ | ✓ | ✓ | ✓ | ✓ | ✓ | x | | | | | | | | |
| L2 + L11 | | x | ✓ | ✓ | ✓ | ✓ | ✓ | ✓ | ✓ | ✓ | x | | | | | | | |
| L2 + L12 | | x | ✓ | ✓ | ✓ | ✓ | ✓ | ✓ | ✓ | ✓ | ✓ | x | | | | | | |
| L2 + L13 | | x | ✓ | ✓ | ✓ | ✓ | ✓ | ✓ | ✓ | ✓ | ✓ | ✓ | x | | | | | |
| L2 + L14 | | x | ✓ | ✓ | ✓ | ✓ | ✓ | ✓ | ✓ | ✓ | ✓ | ✓ | ✓ | x | | | | |
| L2 + L15 | | x | ✓ | ✓ | ✓ | ✓ | ✓ | ✓ | ✓ | ✓ | ✓ | ✓ | ✓ | ✓ | x | | | |
| L2 + L16 | | x | ✓ | ✓ | ✓ | ✓ | ✓ | ✓ | ✓ | ✓ | ✓ | ✓ | ✓ | ✓ | ✓ | x | | |
| L2 + L17 | | x | ✓ | ✓ | ✓ | ✓ | ✓ | ✓ | ✓ | ✓ | ✓ | ✓ | ✓ | ✓ | ✓ | ✓ | x | |
| L2 + L18 | | x | ✓ | ✓ | ✓ | ✓ | ✓ | ✓ | ✓ | ✓ | ✓ | ✓ | ✓ | ✓ | ✓ | ✓ | ✓ | x |
| L2 + L19 | | x | ✓ | ✓ | ✓ | ✓ | ✓ | ✓ | ✓ | ✓ | ✓ | ✓ | ✓ | ✓ | ✓ | ✓ | ✓ | ✓ |
| L2 + L20 | | x | ✓ | ✓ | ✓ | ✓ | ✓ | ✓ | ✓ | ✓ | ✓ | ✓ | ✓ | ✓ | ✓ | ✓ | ✓ | ✓ |
| L2 + L21 | | x | ✓ | ✓ | ✓ | ✓ | ✓ | ✓ | ✓ | ✓ | ✓ | ✓ | ✓ | ✓ | ✓ | ✓ | ✓ | ✓ |
| L2 + L22 | | x | ✓ | ✓ | ✓ | ✓ | ✓ | ✓ | ✓ | ✓ | ✓ | ✓ | ✓ | ✓ | ✓ | ✓ | ✓ | ✓ |
| L2 + L23 | | x | ✓ | ✓ | ✓ | ✓ | ✓ | ✓ | ✓ | ✓ | ✓ | ✓ | ✓ | ✓ | ✓ | ✓ | ✓ | ✓ |
| L2 + L24 | | x | ✓ | ✓ | ✓ | ✓ | ✓ | ✓ | ✓ | ✓ | ✓ | ✓ | ✓ | ✓ | ✓ | ✓ | ✓ | ✓ |
| L2 + L25 | | x | ✓ | ✓ | ✓ | ✓ | ✓ | ✓ | ✓ | ✓ | ✓ | ✓ | ✓ | ✓ | ✓ | ✓ | ✓ | ✓ |
| L2 + L26 | | x | ✓ | ✓ | ✓ | ✓ | ✓ | ✓ | ✓ | ✓ | ✓ | ✓ | ✓ | ✓ | ✓ | ✓ | ✓ | ✓ |
| L2 + L27 | | x | ✓ | ✓ | ✓ | ✓ | ✓ | ✓ | ✓ | ✓ | ✓ | ✓ | ✓ | ✓ | ✓ | ✓ | ✓ | ✓ |
| L2 + L28 | | x | ✓ | ✓ | ✓ | ✓ | ✓ | ✓ | ✓ | ✓ | ✓ | ✓ | ✓ | ✓ | ✓ | ✓ | ✓ | ✓ |
| L2 + L29 | | x | ✓ | ✓ | ✓ | ✓ | ✓ | ✓ | ✓ | ✓ | ✓ | ✓ | ✓ | ✓ | ✓ | ✓ | ✓ | ✓ |
| L2 + L30 | | x | ✓ | ✓ | ✓ | ✓ | ✓ | ✓ | ✓ | ✓ | ✓ | ✓ | ✓ | ✓ | ✓ | ✓ | ✓ | ✓ |
| L2 + L31 | | x | ✓ | ✓ | ✓ | ✓ | ✓ | ✓ | ✓ | ✓ | ✓ | ✓ | ✓ | ✓ | ✓ | ✓ | ✓ | ✓ |
| L2 + L32 | | x | ✓ | ✓ | ✓ | ✓ | ✓ | ✓ | ✓ | ✓ | ✓ | ✓ | ✓ | ✓ | ✓ | ✓ | ✓ | ✓ |
| L3 + L4 | | | x | x | | | | | | | | | | | | | | |
| L3 + L5 | | | x | ✓ | x | | | | | | | | | | | | | |
| L3 + L6 | | | x | ✓ | ✓ | x | | | | | | | | | | | | |
| L3 + L7 | | | x | ✓ | ✓ | ✓ | x | | | | | | | | | | | |
| L3 + L8 | | | x | ✓ | ✓ | ✓ | ✓ | x | | | | | | | | | | |
| L3 + L9 | | | x | ✓ | ✓ | ✓ | ✓ | ✓ | x | | | | | | | | | |
| L3 + L10 | | | x | ✓ | ✓ | ✓ | ✓ | ✓ | ✓ | x | | | | | | | | |
| L3 + L11 | | | x | ✓ | ✓ | ✓ | ✓ | ✓ | ✓ | ✓ | x | | | | | | | |
| L3 + L12 | | | x | ✓ | ✓ | ✓ | ✓ | ✓ | ✓ | ✓ | ✓ | x | | | | | | |
| L3 + L13 | | | x | ✓ | ✓ | ✓ | ✓ | ✓ | ✓ | ✓ | ✓ | ✓ | x | | | | | |
| L3 + L14 | | | x | ✓ | ✓ | ✓ | ✓ | ✓ | ✓ | ✓ | ✓ | ✓ | ✓ | x | | | | |
| L3 + L15 | | | x | ✓ | ✓ | ✓ | ✓ | ✓ | ✓ | ✓ | ✓ | ✓ | ✓ | ✓ | x | | | |
| L3 + L16 | | | x | ✓ | ✓ | ✓ | ✓ | ✓ | ✓ | ✓ | ✓ | ✓ | ✓ | ✓ | ✓ | x | | |
| L3 + L17 | | | x | ✓ | ✓ | ✓ | ✓ | ✓ | ✓ | ✓ | ✓ | ✓ | ✓ | ✓ | ✓ | ✓ | x | |
| L3 + L18 | | | x | ✓ | ✓ | ✓ | ✓ | ✓ | ✓ | ✓ | ✓ | ✓ | ✓ | ✓ | ✓ | ✓ | ✓ | x |
| L3 + L19 | | | x | ✓ | ✓ | ✓ | ✓ | ✓ | ✓ | ✓ | ✓ | ✓ | ✓ | ✓ | ✓ | ✓ | ✓ | ✓ |
| L3 + L20 | | | x | ✓ | ✓ | ✓ | ✓ | ✓ | ✓ | ✓ | ✓ | ✓ | ✓ | ✓ | ✓ | ✓ | ✓ | ✓ |
| L3 + L21 | | | x | ✓ | ✓ | ✓ | ✓ | ✓ | ✓ | ✓ | ✓ | ✓ | ✓ | ✓ | ✓ | ✓ | ✓ | ✓ |
| L3 + L22 | | | x | ✓ | ✓ | ✓ | ✓ | ✓ | ✓ | ✓ | ✓ | ✓ | ✓ | ✓ | ✓ | ✓ | ✓ | ✓ |
| L3 + L23 | | | x | ✓ | ✓ | ✓ | ✓ | ✓ | ✓ | ✓ | ✓ | ✓ | ✓ | ✓ | ✓ | ✓ | ✓ | ✓ |
| L3 + L24 | | | x | ✓ | ✓ | ✓ | ✓ | ✓ | ✓ | ✓ | ✓ | ✓ | ✓ | ✓ | ✓ | ✓ | ✓ | ✓ |
| L3 + L25 | | | x | ✓ | ✓ | ✓ | ✓ | ✓ | ✓ | ✓ | ✓ | ✓ | ✓ | ✓ | ✓ | ✓ | ✓ | ✓ |
| L3 + L26 | | | x | ✓ | ✓ | ✓ | ✓ | ✓ | ✓ | ✓ | ✓ | ✓ | ✓ | ✓ | ✓ | ✓ | ✓ | ✓ |
| L3 + L27 | | | x | ✓ | ✓ | ✓ | ✓ | ✓ | ✓ | ✓ | ✓ | ✓ | ✓ | ✓ | ✓ | ✓ | ✓ | ✓ |
| L3 + L28 | | | x | ✓ | ✓ | ✓ | ✓ | ✓ | ✓ | ✓ | ✓ | ✓ | ✓ | ✓ | ✓ | ✓ | ✓ | ✓ |
| L3 + L29 | | | x | ✓ | ✓ | ✓ | ✓ | ✓ | ✓ | ✓ | ✓ | ✓ | ✓ | ✓ | ✓ | ✓ | ✓ | ✓ |
| L3 + L30 | | | x | ✓ | ✓ | ✓ | ✓ | ✓ | ✓ | ✓ | ✓ | ✓ | ✓ | ✓ | ✓ | ✓ | ✓ | ✓ |
| L3 + L31 | | | x | ✓ | ✓ | ✓ | ✓ | ✓ | ✓ | ✓ | ✓ | ✓ | ✓ | ✓ | ✓ | ✓ | ✓ | ✓ |
| L3 + L32 | | | x | ✓ | ✓ | ✓ | ✓ | ✓ | ✓ | ✓ | ✓ | ✓ | ✓ | ✓ | ✓ | ✓ | ✓ | ✓ |
| L4 + L5 | | | | x | x | | | | | | | | | | | | | |
| L4 + L6 | | | | x | ✓ | x | | | | | | | | | | | | |
| L4 + L7 | | | | x | ✓ | ✓ | x | | | | | | | | | | | |
| L4 + L8 | | | | x | ✓ | ✓ | ✓ | x | | | | | | | | | | |
| L4 + L9 | | | | x | ✓ | ✓ | ✓ | ✓ | x | | | | | | | | | |
| L4 + L10 | | | | x | ✓ | ✓ | ✓ | ✓ | ✓ | x | | | | | | | | |
| L4 + L11 | | | | x | ✓ | ✓ | ✓ | ✓ | ✓ | ✓ | x | | | | | | | |
| L4 + L12 | | | | x | ✓ | ✓ | ✓ | ✓ | ✓ | ✓ | ✓ | x | | | | | | |
| L4 + L13 | | | | x | ✓ | ✓ | ✓ | ✓ | ✓ | ✓ | ✓ | ✓ | x | | | | | |
| L4 + L14 | | | | x | ✓ | ✓ | ✓ | ✓ | ✓ | ✓ | ✓ | ✓ | ✓ | x | | | | |
| L4 + L15 | | | | x | ✓ | ✓ | ✓ | ✓ | ✓ | ✓ | ✓ | ✓ | ✓ | ✓ | x | | | |
| L4 + L16 | | | | x | ✓ | ✓ | ✓ | ✓ | ✓ | ✓ | ✓ | ✓ | ✓ | ✓ | ✓ | x | | |
| L4 + L17 | | | | x | ✓ | ✓ | ✓ | ✓ | ✓ | ✓ | ✓ | ✓ | ✓ | ✓ | ✓ | ✓ | x | |
| L4 + L18 | | | | x | ✓ | ✓ | ✓ | ✓ | ✓ | ✓ | ✓ | ✓ | ✓ | ✓ | ✓ | ✓ | ✓ | x |
| L4 + L19 | | | | x | ✓ | ✓ | ✓ | ✓ | ✓ | ✓ | ✓ | ✓ | ✓ | ✓ | ✓ | ✓ | ✓ | ✓ |
| L4 + L20 | | | | x | ✓ | ✓ | ✓ | ✓ | ✓ | ✓ | ✓ | ✓ | ✓ | ✓ | ✓ | ✓ | ✓ | ✓ |
| L4 + L21 | | | | x | ✓ | ✓ | ✓ | ✓ | ✓ | ✓ | ✓ | ✓ | ✓ | ✓ | ✓ | ✓ | ✓ | ✓ |
| L4 + L22 | | | | x | ✓ | ✓ | ✓ | ✓ | ✓ | ✓ | ✓ | ✓ | ✓ | ✓ | ✓ | ✓ | ✓ | ✓ |
| L4 + L23 | | | | x | ✓ | ✓ | ✓ | ✓ | ✓ | ✓ | ✓ | ✓ | ✓ | ✓ | ✓ | ✓ | ✓ | ✓ |
| L4 + L24 | | | | x | ✓ | ✓ | ✓ | ✓ | ✓ | ✓ | ✓ | ✓ | ✓ | ✓ | ✓ | ✓ | ✓ | ✓ |
| L4 + L25 | | | | x | ✓ | ✓ | ✓ | ✓ | ✓ | ✓ | ✓ | ✓ | ✓ | ✓ | ✓ | ✓ | ✓ | ✓ |
| L4 + L26 | | | | x | ✓ | ✓ | ✓ | ✓ | ✓ | ✓ | ✓ | ✓ | ✓ | ✓ | ✓ | ✓ | ✓ | ✓ |
| L4 + L27 | | | | x | ✓ | ✓ | ✓ | ✓ | ✓ | ✓ | ✓ | ✓ | ✓ | ✓ | ✓ | ✓ | ✓ | ✓ |
| L4 + L28 | | | | x | ✓ | ✓ | ✓ | ✓ | ✓ | ✓ | ✓ | ✓ | ✓ | ✓ | ✓ | ✓ | ✓ | ✓ |
| L4 + L29 | | | | x | ✓ | ✓ | ✓ | ✓ | ✓ | ✓ | ✓ | ✓ | ✓ | ✓ | ✓ | ✓ | ✓ | ✓ |
| L4 + L30 | | | | x | ✓ | ✓ | ✓ | ✓ | ✓ | ✓ | ✓ | ✓ | ✓ | ✓ | ✓ | ✓ | ✓ | ✓ |
| L4 + L31 | | | | x | ✓ | ✓ | ✓ | ✓ | ✓ | ✓ | ✓ | ✓ | ✓ | ✓ | ✓ | ✓ | ✓ | ✓ |
| L4 + L32 | | | | x | ✓ | ✓ | ✓ | ✓ | ✓ | ✓ | ✓ | ✓ | ✓ | ✓ | ✓ | ✓ | ✓ | ✓ |
| L5 + L6 | | | | | x | x | | | | | | | | | | | | |
| L5 + L7 | | | | | x | ✓ | x | | | | | | | | | | | |
| L5 + L8 | | | | | x | ✓ | ✓ | x | | | | | | | | | | |
| L5 + L9 | | | | | x | ✓ | ✓ | ✓ | x | | | | | | | | | |
| L5 + L10 | | | | | x | ✓ | ✓ | ✓ | ✓ | x | | | | | | | | |
| L5 + L11 | | | | | x | ✓ | ✓ | ✓ | ✓ | ✓ | x | | | | | | | |
| L5 + L12 | | | | | x | ✓ | ✓ | ✓ | ✓ | ✓ | ✓ | x | | | | | | |
| L5 + L13 | | | | | x | ✓ | ✓ | ✓ | ✓ | ✓ | ✓ | ✓ | x | | | | | |
| L5 + L14 | | | | | x | ✓ | ✓ | ✓ | ✓ | ✓ | ✓ | ✓ | ✓ | x | | | | |
| L5 + L15 | | | | | x | ✓ | ✓ | ✓ | ✓ | ✓ | ✓ | ✓ | ✓ | ✓ | x | | | |
| L5 + L16 | | | | | x | ✓ | ✓ | ✓ | ✓ | ✓ | ✓ | ✓ | ✓ | ✓ | ✓ | x | | |
| L5 + L17 | | | | | x | ✓ | ✓ | ✓ | ✓ | ✓ | ✓ | ✓ | ✓ | ✓ | ✓ | ✓ | x | |
| L5 + L18 | | | | | x | ✓ | ✓ | ✓ | ✓ | ✓ | ✓ | ✓ | ✓ | ✓ | ✓ | ✓ | ✓ | x |
| L5 + L19 | | | | | x | ✓ | ✓ | ✓ | ✓ | ✓ | ✓ | ✓ | ✓ | ✓ | ✓ | ✓ | ✓ | ✓ |
| L5 + L20 | | | | | x | ✓ | ✓ | ✓ | ✓ | ✓ | ✓ | ✓ | ✓ | ✓ | ✓ | ✓ | ✓ | ✓ |
| L5 + L21 | | | | | x | ✓ | ✓ | ✓ | ✓ | ✓ | ✓ | ✓ | ✓ | ✓ | ✓ | ✓ | ✓ | ✓ |
| L5 + L22 | | | | | x | ✓ | ✓ | ✓ | ✓ | ✓ | ✓ | ✓ | ✓ | ✓ | ✓ | ✓ | ✓ | ✓ |
| L5 + L23 | | | | | x | ✓ | ✓ | ✓ | ✓ | ✓ | ✓ | ✓ | ✓ | ✓ | ✓ | ✓ | ✓ | ✓ |
| L5 + L24 | | | | | x | ✓ | ✓ | ✓ | ✓ | ✓ | ✓ | ✓ | ✓ | ✓ | ✓ | ✓ | ✓ | ✓ |
| L5 + L25 | | | | | x | ✓ | ✓ | ✓ | ✓ | ✓ | ✓ | ✓ | ✓ | ✓ | ✓ | ✓ | ✓ | ✓ |
| L5 + L26 | | | | | x | ✓ | ✓ | ✓ | ✓ | ✓ | ✓ | ✓ | ✓ | ✓ | ✓ | ✓ | ✓ | ✓ |
| L5 + L27 | | | | | x | ✓ | ✓ | ✓ | ✓ | ✓ | ✓ | ✓ | ✓ | ✓ | ✓ | ✓ | ✓ | ✓ |
| L5 + L28 | | | | | x | ✓ | ✓ | ✓ | ✓ | ✓ | ✓ | ✓ | ✓ | ✓ | ✓ | ✓ | ✓ | ✓ |
| L5 + L29 | | | | | x | ✓ | ✓ | ✓ | ✓ | ✓ | ✓ | ✓ | ✓ | ✓ | ✓ | ✓ | ✓ | ✓ |
| L5 + L30 | | | | | x | ✓ | ✓ | ✓ | ✓ | ✓ | ✓ | ✓ | ✓ | ✓ | ✓ | ✓ | ✓ | ✓ |
| L5 + L31 | | | | | x | ✓ | ✓ | ✓ | ✓ | ✓ | ✓ | ✓ | ✓ | ✓ | ✓ | ✓ | ✓ | ✓ |
| L5 + L32 | | | | | x | ✓ | ✓ | ✓ | ✓ | ✓ | ✓ | ✓ | ✓ | ✓ | ✓ | ✓ | ✓ | ✓ |
| L6 + L7 | | | | | | x | x | | | | | | | | | | | |
| L6 + L8 | | | | | | x | ✓ | x | | | | | | | | | | |
| L6 + L9 | | | | | | x | ✓ | ✓ | x | | | | | | | | | |
| L6 + L10 | | | | | | x | ✓ | ✓ | ✓ | x | | | | | | | | |
| L6 + L11 | | | | | | x | ✓ | ✓ | ✓ | ✓ | x | | | | | | | |
| L6 + L12 | | | | | | x | ✓ | ✓ | ✓ | ✓ | ✓ | x | | | | | | |
| L6 + L13 | | | | | | x | ✓ | ✓ | ✓ | ✓ | ✓ | ✓ | x | | | | | |
| L6 + L14 | | | | | | x | ✓ | ✓ | ✓ | ✓ | ✓ | ✓ | ✓ | x | | | | |
| L6 + L15 | | | | | | x | ✓ | ✓ | ✓ | ✓ | ✓ | ✓ | ✓ | ✓ | x | | | |
| L6 + L16 | | | | | | x | ✓ | ✓ | ✓ | ✓ | ✓ | ✓ | ✓ | ✓ | ✓ | x | | |
| L6 + L17 | | | | | | x | ✓ | ✓ | ✓ | ✓ | ✓ | ✓ | ✓ | ✓ | ✓ | ✓ | x | |
| L6 + L18 | | | | | | x | ✓ | ✓ | ✓ | ✓ | ✓ | ✓ | ✓ | ✓ | ✓ | ✓ | ✓ | x |
| L6 + L19 | | | | | | x | ✓ | ✓ | ✓ | ✓ | ✓ | ✓ | ✓ | ✓ | ✓ | ✓ | ✓ | ✓ |
| L6 + L20 | | | | | | x | ✓ | ✓ | ✓ | ✓ | ✓ | ✓ | ✓ | ✓ | ✓ | ✓ | ✓ | ✓ |
| L6 + L21 | | | | | | x | ✓ | ✓ | ✓ | ✓ | ✓ | ✓ | ✓ | ✓ | ✓ | ✓ | ✓ | ✓ |
| L6 + L22 | | | | | | x | ✓ | ✓ | ✓ | ✓ | ✓ | ✓ | ✓ | ✓ | ✓ | ✓ | ✓ | ✓ |
| L6 + L23 | | | | | | x | ✓ | ✓ | ✓ | ✓ | ✓ | ✓ | ✓ | ✓ | ✓ | ✓ | ✓ | ✓ |
| L6 + L24 | | | | | | x | ✓ | ✓ | ✓ | ✓ | ✓ | ✓ | ✓ | ✓ | ✓ | ✓ | ✓ | ✓ |
| L6 + L25 | | | | | | x | ✓ | ✓ | ✓ | ✓ | ✓ | ✓ | ✓ | ✓ | ✓ | ✓ | ✓ | ✓ |
| L6 + L26 | | | | | | x | ✓ | ✓ | ✓ | ✓ | ✓ | ✓ | ✓ | ✓ | ✓ | ✓ | ✓ | ✓ |
| L6 + L27 | | | | | | x | ✓ | ✓ | ✓ | ✓ | ✓ | ✓ | ✓ | ✓ | ✓ | ✓ | ✓ | ✓ |
| L6 + L28 | | | | | | x | ✓ | ✓ | ✓ | ✓ | ✓ | ✓ | ✓ | ✓ | ✓ | ✓ | ✓ | ✓ |
| L6 + L29 | | | | | | x | ✓ | ✓ | ✓ | ✓ | ✓ | ✓ | ✓ | ✓ | ✓ | ✓ | ✓ | ✓ |
| L6 + L30 | | | | | | x | ✓ | ✓ | ✓ | ✓ | ✓ | ✓ | ✓ | ✓ | ✓ | ✓ | ✓ | ✓ |
| L6 + L31 | | | | | | x | ✓ | ✓ | ✓ | ✓ | ✓ | ✓ | ✓ | ✓ | ✓ | ✓ | ✓ | ✓ |
| L6 + L32 | | | | | | x | ✓ | ✓ | ✓ | ✓ | ✓ | ✓ | ✓ | ✓ | ✓ | ✓ | ✓ | ✓ |
| L7 + L8 | | | | | | | x | x | | | | | | | | | | |
| L7 + L9 | | | | | | | x | ✓ | x | | | | | | | | | |
| L7 + L10 | | | | | | | x | ✓ | ✓ | x | | | | | | | | |
| L7 + L11 | | | | | | | x | ✓ | ✓ | ✓ | x | | | | | | | |
| L7 + L12 | | | | | | | x | ✓ | ✓ | ✓ | ✓ | x | | | | | | |
| L7 + L13 | | | | | | | x | ✓ | ✓ | ✓ | ✓ | ✓ | x | | | | | |
| L7 + L14 | | | | | | | x | ✓ | ✓ | ✓ | ✓ | ✓ | ✓ | x | | | | |
| L7 + L15 | | | | | | | x | ✓ | ✓ | ✓ | ✓ | ✓ | ✓ | ✓ | x | | | |
| L7 + L16 | | | | | | | x | ✓ | ✓ | ✓ | ✓ | ✓ | ✓ | ✓ | ✓ | x | | |
| L7 + L17 | | | | | | | x | ✓ | ✓ | ✓ | ✓ | ✓ | ✓ | ✓ | ✓ | ✓ | x | |
| L7 + L18 | | | | | | | x | ✓ | ✓ | ✓ | ✓ | ✓ | ✓ | ✓ | ✓ | ✓ | ✓ | x |
| L7 + L19 | | | | | | | x | ✓ | ✓ | ✓ | ✓ | ✓ | ✓ | ✓ | ✓ | ✓ | ✓ | ✓ |
| L7 + L20 | | | | | | | x | ✓ | ✓ | ✓ | ✓ | ✓ | ✓ | ✓ | ✓ | ✓ | ✓ | ✓ |
| L7 + L21 | | | | | | | x | ✓ | ✓ | ✓ | ✓ | ✓ | ✓ | ✓ | ✓ | ✓ | ✓ | ✓ |
| L7 + L22 | | | | | | | x | ✓ | ✓ | ✓ | ✓ | ✓ | ✓ | ✓ | ✓ | ✓ | ✓ | ✓ |
| L7 + L23 | | | | | | | x | ✓ | ✓ | ✓ | ✓ | ✓ | ✓ | ✓ | ✓ | ✓ | ✓ | ✓ |
| L7 + L24 | | | | | | | x | ✓ | ✓ | ✓ | ✓ | ✓ | ✓ | ✓ | ✓ | ✓ | ✓ | ✓ |
| L7 + L25 | | | | | | | x | ✓ | ✓ | ✓ | ✓ | ✓ | ✓ | ✓ | ✓ | ✓ | ✓ | ✓ |
| L7 + L26 | | | | | | | x | ✓ | ✓ | ✓ | ✓ | ✓ | ✓ | ✓ | ✓ | ✓ | ✓ | ✓ |
| L7 + L27 | | | | | | | x | ✓ | ✓ | ✓ | ✓ | ✓ | ✓ | ✓ | ✓ | ✓ | ✓ | ✓ |
| L7 + L28 | | | | | | | x | ✓ | ✓ | ✓ | ✓ | ✓ | ✓ | ✓ | ✓ | ✓ | ✓ | ✓ |
| L7 + L29 | | | | | | | x | ✓ | ✓ | ✓ | ✓ | ✓ | ✓ | ✓ | ✓ | ✓ | ✓ | ✓ |
| L7 + L30 | | | | | | | x | ✓ | ✓ | ✓ | ✓ | ✓ | ✓ | ✓ | ✓ | ✓ | ✓ | ✓ |
| L7 + L31 | | | | | | | x | ✓ | ✓ | ✓ | ✓ | ✓ | ✓ | ✓ | ✓ | ✓ | ✓ | ✓ |
| L7 + L32 | | | | | | | x | ✓ | ✓ | ✓ | ✓ | ✓ | ✓ | ✓ | ✓ | ✓ | ✓ | ✓ |
| L8 + L9 | | | | | | | | x | x | | | | | | | | | |
| L8 + L10 | | | | | | | | x | ✓ | x | | | | | | | | |
| L8 + L11 | | | | | | | | x | ✓ | ✓ | x | | | | | | | |
| L8 + L12 | | | | | | | | x | ✓ | ✓ | ✓ | x | | | | | | |
| L8 + L13 | | | | | | | | x | ✓ | ✓ | ✓ | ✓ | x | | | | | |
| L8 + L14 | | | | | | | | x | ✓ | ✓ | ✓ | ✓ | ✓ | x | | | | |
| L8 + L15 | | | | | | | | x | ✓ | ✓ | ✓ | ✓ | ✓ | ✓ | x | | | |
| L8 + L16 | | | | | | | | x | ✓ | ✓ | ✓ | ✓ | ✓ | ✓ | ✓ | x | | |
| L8 + L17 | | | | | | | | x | ✓ | ✓ | ✓ | ✓ | ✓ | ✓ | ✓ | ✓ | x | |
| L8 + L18 | | | | | | | | x | ✓ | ✓ | ✓ | ✓ | ✓ | ✓ | ✓ | ✓ | ✓ | x |
| L8 + L19 | | | | | | | | x | ✓ | ✓ | ✓ | ✓ | ✓ | ✓ | ✓ | ✓ | ✓ | ✓ |
| L8 + L20 | | | | | | | | x | ✓ | ✓ | ✓ | ✓ | ✓ | ✓ | ✓ | ✓ | ✓ | ✓ |
| L8 + L21 | | | | | | | | x | ✓ | ✓ | ✓ | ✓ | ✓ | ✓ | ✓ | ✓ | ✓ | ✓ |
| L8 + L22 | | | | | | | | x | ✓ | ✓ | ✓ | ✓ | ✓ | ✓ | ✓ | ✓ | ✓ | ✓ |
| L8 + L23 | | | | | | | | x | ✓ | ✓ | ✓ | ✓ | ✓ | ✓ | ✓ | ✓ | ✓ | ✓ |
| L8 + L24 | | | | | | | | x | ✓ | ✓ | ✓ | ✓ | ✓ | ✓ | ✓ | ✓ | ✓ | ✓ |
| L8 + L25 | | | | | | | | x | ✓ | ✓ | ✓ | ✓ | ✓ | ✓ | ✓ | ✓ | ✓ | ✓ |
| L8 + L26 | | | | | | | | x | ✓ | ✓ | ✓ | ✓ | ✓ | ✓ | ✓ | ✓ | ✓ | ✓ |
| L8 + L27 | | | | | | | | x | ✓ | ✓ | ✓ | ✓ | ✓ | ✓ | ✓ | ✓ | ✓ | ✓ |
| L8 + L28 | | | | | | | | x | ✓ | ✓ | ✓ | ✓ | ✓ | ✓ | ✓ | ✓ | ✓ | ✓ |
| L8 + L29 | | | | | | | | x | ✓ | ✓ | ✓ | ✓ | ✓ | ✓ | ✓ | ✓ | ✓ | ✓ |
| L8 + L30 | | | | | | | | x | ✓ | ✓ | ✓ | ✓ | ✓ | ✓ | ✓ | ✓ | ✓ | ✓ |
| L8 + L31 | | | | | | | | x | ✓ | ✓ | ✓ | ✓ | ✓ | ✓ | ✓ | ✓ | ✓ | ✓ |
| L8 + L32 | | | | | | | | x | ✓ | ✓ | ✓ | ✓ | ✓ | ✓ | ✓ | ✓ | ✓ | ✓ |
| L9 + L10 | | | | | | | | | x | x | | | | | | | | |
| L9 + L11 | | | | | | | | | x | ✓ | x | | | | | | | |
| L9 + L12 | | | | | | | | | x | ✓ | ✓ | x | | | | | | |
| L9 + L13 | | | | | | | | | x | ✓ | ✓ | ✓ | x | | | | | |
| L9 + L14 | | | | | | | | | x | ✓ | ✓ | ✓ | ✓ | x | | | | |
| L9 + L15 | | | | | | | | | x | ✓ | ✓ | ✓ | ✓ | ✓ | x | | | |
| L9 + L16 | | | | | | | | | x | ✓ | ✓ | ✓ | ✓ | ✓ | ✓ | x | | |
| L9 + L17 | | | | | | | | | x | ✓ | ✓ | ✓ | ✓ | ✓ | ✓ | ✓ | x | |
| L9 + L18 | | | | | | | | | x | ✓ | ✓ | ✓ | ✓ | ✓ | ✓ | ✓ | ✓ | x |
| L9 + L19 | | | | | | | | | x | ✓ | ✓ | ✓ | ✓ | ✓ | ✓ | ✓ | ✓ | ✓ |
| L9 + L20 | | | | | | | | | x | ✓ | ✓ | ✓ | ✓ | ✓ | ✓ | ✓ | ✓ | ✓ |
| L9 + L21 | | | | | | | | | x | ✓ | ✓ | ✓ | ✓ | ✓ | ✓ | ✓ | ✓ | ✓ |
| L9 + L22 | | | | | | | | | x | ✓ | ✓ | ✓ | ✓ | ✓ | ✓ | ✓ | ✓ | ✓ |
| L9 + L23 | | | | | | | | | x | ✓ | ✓ | ✓ | ✓ | ✓ | ✓ | ✓ | ✓ | ✓ |
| L9 + L24 | | | | | | | | | x | ✓ | ✓ | ✓ | ✓ | ✓ | ✓ | ✓ | ✓ | ✓ |
| L9 + L25 | | | | | | | | | x | ✓ | ✓ | ✓ | ✓ | ✓ | ✓ | ✓ | ✓ | ✓ |
| L9 + L26 | | | | | | | | | x | ✓ | ✓ | ✓ | ✓ | ✓ | ✓ | ✓ | ✓ | ✓ |
| L9 + L27 | | | | | | | | | x | ✓ | ✓ | ✓ | ✓ | ✓ | ✓ | ✓ | ✓ | ✓ |
| L9 + L28 | | | | | | | | | x | ✓ | ✓ | ✓ | ✓ | ✓ | ✓ | ✓ | ✓ | ✓ |
| L9 + L29 | | | | | | | | | x | ✓ | ✓ | ✓ | ✓ | ✓ | ✓ | ✓ | ✓ | ✓ |
| L9 + L30 | | | | | | | | | x | ✓ | ✓ | ✓ | ✓ | ✓ | ✓ | ✓ | ✓ | ✓ |
| L9 + L31 | | | | | | | | | x | ✓ | ✓ | ✓ | ✓ | ✓ | ✓ | ✓ | ✓ | ✓ |
| L9 + L32 | | | | | | | | | x | ✓ | ✓ | ✓ | ✓ | ✓ | ✓ | ✓ | ✓ | ✓ |
| L10 + L11 | | | | | | | | | | x | x | | | | | | | |
| L10 + L12 | | | | | | | | | | x | ✓ | x | | | | | | |
| L10 + L13 | | | | | | | | | | x | ✓ | ✓ | x | | | | | |
| L10 + L14 | | | | | | | | | | x | ✓ | ✓ | ✓ | x | | | | |
| L10 + L15 | | | | | | | | | | x | ✓ | ✓ | ✓ | ✓ | x | | | |
| L10 + L16 | | | | | | | | | | x | ✓ | ✓ | ✓ | ✓ | ✓ | x | | |
| L10 + L17 | | | | | | | | | | x | ✓ | ✓ | ✓ | ✓ | ✓ | ✓ | x | |
| L10 + L18 | | | | | | | | | | x | ✓ | ✓ | ✓ | ✓ | ✓ | ✓ | ✓ | x |
| L10 + L19 | | | | | | | | | | x | ✓ | ✓ | ✓ | ✓ | ✓ | ✓ | ✓ | ✓ |
| L10 + L20 | | | | | | | | | | x | ✓ | ✓ | ✓ | ✓ | ✓ | ✓ | ✓ | ✓ |
| L10 + L21 | | | | | | | | | | x | ✓ | ✓ | ✓ | ✓ | ✓ | ✓ | ✓ | ✓ |
| L10 + L22 | | | | | | | | | | x | ✓ | ✓ | ✓ | ✓ | ✓ | ✓ | ✓ | ✓ |
| L10 + L23 | | | | | | | | | | x | ✓ | ✓ | ✓ | ✓ | ✓ | ✓ | ✓ | ✓ |
| L10 + L24 | | | | | | | | | | x | ✓ | ✓ | ✓ | ✓ | ✓ | ✓ | ✓ | ✓ |
| L10 + L25 | | | | | | | | | | x | ✓ | ✓ | ✓ | ✓ | ✓ | ✓ | ✓ | ✓ |
| L10 + L26 | | | | | | | | | | x | ✓ | ✓ | ✓ | ✓ | ✓ | ✓ | ✓ | ✓ |
| L10 + L27 | | | | | | | | | | x | ✓ | ✓ | ✓ | ✓ | ✓ | ✓ | ✓ | ✓ |
| L10 + L28 | | | | | | | | | | x | ✓ | ✓ | ✓ | ✓ | ✓ | ✓ | ✓ | ✓ |
| L10 + L29 | | | | | | | | | | x | ✓ | ✓ | ✓ | ✓ | ✓ | ✓ | ✓ | ✓ |
| L10 + L30 | | | | | | | | | | x | ✓ | ✓ | ✓ | ✓ | ✓ | ✓ | ✓ | ✓ |
| L10 + L31 | | | | | | | | | | x | ✓ | ✓ | ✓ | ✓ | ✓ | ✓ | ✓ | ✓ |
| L10 + L32 | | | | | | | | | | x | ✓ | ✓ | ✓ | ✓ | ✓ | ✓ | ✓ | ✓ |
| L11 + L12 | | | | | | | | | | | x | x | | | | | | |
| L11 + L13 | | | | | | | | | | | x | ✓ | x | | | | | |
| L11 + L14 | | | | | | | | | | | x | ✓ | ✓ | x | | | | |
| L11 + L15 | | | | | | | | | | | x | ✓ | ✓ | ✓ | x | | | |
| L11 + L16 | | | | | | | | | | | x | ✓ | ✓ | ✓ | ✓ | x | | |
| L11 + L17 | | | | | | | | | | | x | ✓ | ✓ | ✓ | ✓ | ✓ | x | |
| L11 + L18 | | | | | | | | | | | x | ✓ | ✓ | ✓ | ✓ | ✓ | ✓ | x |
| L11 + L19 | | | | | | | | | | | x | ✓ | ✓ | ✓ | ✓ | ✓ | ✓ | ✓ |
| L11 + L20 | | | | | | | | | | | x | ✓ | ✓ | ✓ | ✓ | ✓ | ✓ | ✓ |
| L11 + L21 | | | | | | | | | | | x | ✓ | ✓ | ✓ | ✓ | ✓ | ✓ | ✓ |
| L11 + L22 | | | | | | | | | | | x | ✓ | ✓ | ✓ | ✓ | ✓ | ✓ | ✓ |
| L11 + L23 | | | | | | | | | | | x | ✓ | ✓ | ✓ | ✓ | ✓ | ✓ | ✓ |
| L11 + L24 | | | | | | | | | | | x | ✓ | ✓ | ✓ | ✓ | ✓ | ✓ | ✓ |
| L11 + L25 | | | | | | | | | | | x | ✓ | ✓ | ✓ | ✓ | ✓ | ✓ | ✓ |
| L11 + L26 | | | | | | | | | | | x | ✓ | ✓ | ✓ | ✓ | ✓ | ✓ | ✓ |
| L11 + L27 | | | | | | | | | | | x | ✓ | ✓ | ✓ | ✓ | ✓ | ✓ | ✓ |
| L11 + L28 | | | | | | | | | | | x | ✓ | ✓ | ✓ | ✓ | ✓ | ✓ | ✓ |
| L11 + L29 | | | | | | | | | | | x | ✓ | ✓ | ✓ | ✓ | ✓ | ✓ | ✓ |
| L11 + L30 | | | | | | | | | | | x | ✓ | ✓ | ✓ | ✓ | ✓ | ✓ | ✓ |
| L11 + L31 | | | | | | | | | | | x | ✓ | ✓ | ✓ | ✓ | ✓ | ✓ | ✓ |
| L11 + L32 | | | | | | | | | | | x | ✓ | ✓ | ✓ | ✓ | ✓ | ✓ | ✓ |
| L12 + L13 | | | | | | | | | | | | x | x | | | | | |
| L12 + L14 | | | | | | | | | | | | x | ✓ | x | | | | |
| L12 + L15 | | | | | | | | | | | | x | ✓ | ✓ | x | | | |
| L12 + L16 | | | | | | | | | | | | x | ✓ | ✓ | ✓ | x | | |
| L12 + L17 | | | | | | | | | | | | x | ✓ | ✓ | ✓ | ✓ | x | |
| L12 + L18 | | | | | | | | | | | | x | ✓ | ✓ | ✓ | ✓ | ✓ | x |
| L12 + L19 | | | | | | | | | | | | x | ✓ | ✓ | ✓ | ✓ | ✓ | ✓ |
| L12 + L20 | | | | | | | | | | | | x | ✓ | ✓ | ✓ | ✓ | ✓ | ✓ |
| L12 + L21 | | | | | | | | | | | | x | ✓ | ✓ | ✓ | ✓ | ✓ | ✓ |
| L12 + L22 | | | | | | | | | | | | x | ✓ | ✓ | ✓ | ✓ | ✓ | ✓ |
| L12 + L23 | | | | | | | | | | | | x | ✓ | ✓ | ✓ | ✓ | ✓ | ✓ |
| L12 + L24 | | | | | | | | | | | | x | ✓ | ✓ | ✓ | ✓ | ✓ | ✓ |
| L12 + L25 | | | | | | | | | | | | x | ✓ | ✓ | ✓ | ✓ | ✓ | ✓ |
| L12 + L26 | | | | | | | | | | | | x | ✓ | ✓ | ✓ | ✓ | ✓ | ✓ |
| L12 + L27 | | | | | | | | | | | | x | ✓ | ✓ | ✓ | ✓ | ✓ | ✓ |
| L12 + L28 | | | | | | | | | | | | x | ✓ | ✓ | ✓ | ✓ | ✓ | ✓ |
| L12 + L29 | | | | | | | | | | | | x | ✓ | ✓ | ✓ | ✓ | ✓ | ✓ |
| L12 + L30 | | | | | | | | | | | | x | ✓ | ✓ | ✓ | ✓ | ✓ | ✓ |
| L12 + L31 | | | | | | | | | | | | x | ✓ | ✓ | ✓ | ✓ | ✓ | ✓ |
| L12 + L32 | | | | | | | | | | | | x | ✓ | ✓ | ✓ | ✓ | ✓ | ✓ |
| L13 + L14 | | | | | | | | | | | | | x | x | | | | |
| L13 + L15 | | | | | | | | | | | | | x | ✓ | x | | | |
| L13 + L16 | | | | | | | | | | | | | x | ✓ | ✓ | x | | |
| L13 + L17 | | | | | | | | | | | | | x | ✓ | ✓ | ✓ | x | |
| L13 + L18 | | | | | | | | | | | | | x | ✓ | ✓ | ✓ | ✓ | x |
| L13 + L19 | | | | | | | | | | | | | x | ✓ | ✓ | ✓ | ✓ | ✓ |
| L13 + L20 | | | | | | | | | | | | | x | ✓ | ✓ | ✓ | ✓ | ✓ |
| L13 + L21 | | | | | | | | | | | | | x | ✓ | ✓ | ✓ | ✓ | ✓ |
| L13 + L22 | | | | | | | | | | | | | x | ✓ | ✓ | ✓ | ✓ | ✓ |
| L13 + L23 | | | | | | | | | | | | | x | ✓ | ✓ | ✓ | ✓ | ✓ |
| L13 + L24 | | | | | | | | | | | | | x | ✓ | ✓ | ✓ | ✓ | ✓ |
| L13 + L25 | | | | | | | | | | | | | x | ✓ | ✓ | ✓ | ✓ | ✓ |
| L13 + L26 | | | | | | | | | | | | | x | ✓ | ✓ | ✓ | ✓ | ✓ |
| L13 + L27 | | | | | | | | | | | | | x | ✓ | ✓ | ✓ | ✓ | ✓ |
| L13 + L28 | | | | | | | | | | | | | x | ✓ | ✓ | ✓ | ✓ | ✓ |
| L13 + L29 | | | | | | | | | | | | | x | ✓ | ✓ | ✓ | ✓ | ✓ |
| L13 + L30 | | | | | | | | | | | | | x | ✓ | ✓ | ✓ | ✓ | ✓ |
| L13 + L31 | | | | | | | | | | | | | x | ✓ | ✓ | ✓ | ✓ | ✓ |
| L13 + L32 | | | | | | | | | | | | | x | ✓ | ✓ | ✓ | ✓ | ✓ |
| L14 + L15 | | | | | | | | | | | | | | x | x | | | |
| L14 + L16 | | | | | | | | | | | | | | x | ✓ | x | | |
| L14 + L17 | | | | | | | | | | | | | | x | ✓ | ✓ | x | |
| L14 + L18 | | | | | | | | | | | | | | x | ✓ | ✓ | ✓ | x |
| L14 + L19 | | | | | | | | | | | | | | x | ✓ | ✓ | ✓ | ✓ |
| L14 + L20 | | | | | | | | | | | | | | x | ✓ | ✓ | ✓ | ✓ |
| L14 + L21 | | | | | | | | | | | | | | x | ✓ | ✓ | ✓ | ✓ |
| L14 + L22 | | | | | | | | | | | | | | x | ✓ | ✓ | ✓ | ✓ |
| L14 + L23 | | | | | | | | | | | | | | x | ✓ | ✓ | ✓ | ✓ |
| L14 + L24 | | | | | | | | | | | | | | x | ✓ | ✓ | ✓ | ✓ |
| L14 + L25 | | | | | | | | | | | | | | x | ✓ | ✓ | ✓ | ✓ |
| L14 + L26 | | | | | | | | | | | | | | x | ✓ | ✓ | ✓ | ✓ |
| L14 + L27 | | | | | | | | | | | | | | x | ✓ | ✓ | ✓ | ✓ |
| L14 + L28 | | | | | | | | | | | | | | x | ✓ | ✓ | ✓ | ✓ |
| L14 + L29 | | | | | | | | | | | | | | x | ✓ | ✓ | ✓ | ✓ |
| L14 + L30 | | | | | | | | | | | | | | x | ✓ | ✓ | ✓ | ✓ |
| L14 + L31 | | | | | | | | | | | | | | x | ✓ | ✓ | ✓ | ✓ |
| L14 + L32 | | | | | | | | | | | | | | x | ✓ | ✓ | ✓ | ✓ |
| L15 + L16 | | | | | | | | | | | | | | | x | x | | |
| L15 + L17 | | | | | | | | | | | | | | | x | ✓ | x | |
| L15 + L18 | | | | | | | | | | | | | | | x | ✓ | ✓ | x |
| L15 + L19 | | | | | | | | | | | | | | | x | ✓ | ✓ | ✓ |
| L15 + L20 | | | | | | | | | | | | | | | x | ✓ | ✓ | ✓ |
| L15 + L21 | | | | | | | | | | | | | | | x | ✓ | ✓ | ✓ |
| L15 + L22 | | | | | | | | | | | | | | | x | ✓ | ✓ | ✓ |
| L15 + L23 | | | | | | | | | | | | | | | x | ✓ | ✓ | ✓ |
| L15 + L24 | | | | | | | | | | | | | | | x | ✓ | ✓ | ✓ |
| L15 + L25 | | | | | | | | | | | | | | | x | ✓ | ✓ | ✓ |
| L15 + L26 | | | | | | | | | | | | | | | x | ✓ | ✓ | ✓ |
| L15 + L27 | | | | | | | | | | | | | | | x | ✓ | ✓ | ✓ |
| L15 + L28 | | | | | | | | | | | | | | | x | ✓ | ✓ | ✓ |
| L15 + L29 | | | | | | | | | | | | | | | x | ✓ | ✓ | ✓ |
| L15 + L30 | | | | | | | | | | | | | | | x | ✓ | ✓ | ✓ |
| L15 + L31 | | | | | | | | | | | | | | | x | ✓ | ✓ | ✓ |
| L15 + L32 | | | | | | | | | | | | | | | x | ✓ | ✓ | ✓ |
| L16 + L17 | | | | | | | | | | | | | | | | x | x | |
| L16 + L18 | | | | | | | | | | | | | | | | x | ✓ | x |
| L16 + L19 | | | | | | | | | | | | | | | | x | ✓ | ✓ |
| L16 + L20 | | | | | | | | | | | | | | | | x | ✓ | ✓ |
| L16 + L21 | | | | | | | | | | | | | | | | x | ✓ | ✓ |
| L16 + L22 | | | | | | | | | | | | | | | | x | ✓ | ✓ |
| L16 + L23 | | | | | | | | | | | | | | | | x | ✓ | ✓ |
| L16 + L24 | | | | | | | | | | | | | | | | x | ✓ | ✓ |
| L16 + L25 | | | | | | | | | | | | | | | | x | ✓ | ✓ |
| L16 + L26 | | | | | | | | | | | | | | | | x | ✓ | ✓ |
| L16 + L27 | | | | | | | | | | | | | | | | x | ✓ | ✓ |
| L16 + L28 | | | | | | | | | | | | | | | | x | ✓ | ✓ |
| L16 + L29 | | | | | | | | | | | | | | | | x | ✓ | ✓ |
| L16 + L30 | | | | | | | | | | | | | | | | x | ✓ | ✓ |
| L16 + L31 | | | | | | | | | | | | | | | | x | ✓ | ✓ |
| L16 + L32 | | | | | | | | | | | | | | | | x | ✓ | ✓ |
| L17 + L18 | | | | | | | | | | | | | | | | | x | x |
| L17 + L19 | | | | | | | | | | | | | | | | | x | ✓ |
| L17 + L20 | | | | | | | | | | | | | | | | | x | ✓ |
| L17 + L21 | | | | | | | | | | | | | | | | | x | ✓ |
| L17 + L22 | | | | | | | | | | | | | | | | | x | ✓ |
| L17 + L23 | | | | | | | | | | | | | | | | | x | ✓ |
| L17 + L24 | | | | | | | | | | | | | | | | | x | ✓ |
| L17 + L25 | | | | | | | | | | | | | | | | | x | ✓ |
| L17 + L26 | | | | | | | | | | | | | | | | | x | ✓ |
| L17 + L27 | | | | | | | | | | | | | | | | | x | ✓ |
| L17 + L28 | | | | | | | | | | | | | | | | | x | ✓ |
| L17 + L29 | | | | | | | | | | | | | | | | | x | ✓ |
| L17 + L30 | | | | | | | | | | | | | | | | | x | ✓ |
| L17 + L31 | | | | | | | | | | | | | | | | | x | ✓ |
| L17 + L32 | | | | | | | | | | | | | | | | | x | ✓ |
| L18 + L19 | | | | | | | | | | | | | | | | | | x |
| L18 + L20 | | | | | | | | | | | | | | | | | | x |
| L18 + L21 | | | | | | | | | | | | | | | | | | x |
| L18 + L22 | | | | | | | | | | | | | | | | | | x |
| L18 + L23 | | | | | | | | | | | | | | | | | | x |
| L18 + L24 | | | | | | | | | | | | | | | | | | x |
| L18 + L25 | | | | | | | | | | | | | | | | | | x |
| L18 + L26 | | | | | | | | | | | | | | | | | | x |
| L18 + L27 | | | | | | | | | | | | | | | | | | x |
| L18 + L28 | | | | | | | | | | | | | | | | | | x |
| L18 + L29 | | | | | | | | | | | | | | | | | | x |
| L18 + L30 | | | | | | | | | | | | | | | | | | x |
| L18 + L31 | | | | | | | | | | | | | | | | | | x |
| L18 + L32 | | | | | | | | | | | | | | | | | | x |
| L19 + L20 | | | | | | | | | | | | | | | | | | |
| L19 + L21 | | | | | | | | | | | | | | | | | | |
| L19 + L22 | | | | | | | | | | | | | | | | | | |
| L19 + L23 | | | | | | | | | | | | | | | | | | |
| L19 + L24 | | | | | | | | | | | | | | | | | | |
| L19 + L25 | | | | | | | | | | | | | | | | | | |
| L19 + L26 | | | | | | | | | | | | | | | | | | |
| L19 + L27 | | | | | | | | | | | | | | | | | | |
| L19 + L28 | | | | | | | | | | | | | | | | | | |
| L19 + L29 | | | | | | | | | | | | | | | | | | |
| L19 + L30 | | | | | | | | | | | | | | | | | | |
| L19 + L31 | | | | | | | | | | | | | | | | | | |
| L19 + L32 | | | | | | | | | | | | | | | | | | |
| L20 + L21 | | | | | | | | | | | | | | | | | | |
| L20 + L22 | | | | | | | | | | | | | | | | | | |
| L20 + L23 | | | | | | | | | | | | | | | | | | |
| L20 + L24 | | | | | | | | | | | | | | | | | | |
| L20 + L25 | | | | | | | | | | | | | | | | | | |
| L20 + L26 | | | | | | | | | | | | | | | | | | |
| L20 + L27 | | | | | | | | | | | | | | | | | | |
| L20 + L28 | | | | | | | | | | | | | | | | | | |
| L20 + L29 | | | | | | | | | | | | | | | | | | |
| L20 + L30 | | | | | | | | | | | | | | | | | | |
| L20 + L31 | | | | | | | | | | | | | | | | | | |
| L20 + L32 | | | | | | | | | | | | | | | | | | |
| L21 + L22 | | | | | | | | | | | | | | | | | | |
| L21 + L23 | | | | | | | | | | | | | | | | | | |
| L21 + L24 | | | | | | | | | | | | | | | | | | |
| L21 + L25 | | | | | | | | | | | | | | | | | | |
| L21 + L26 | | | | | | | | | | | | | | | | | | |
| L21 + L27 | | | | | | | | | | | | | | | | | | |
| L21 + L28 | | | | | | | | | | | | | | | | | | |
| L21 + L29 | | | | | | | | | | | | | | | | | | |
| L21 + L30 | | | | | | | | | | | | | | | | | | |
| L21 + L31 | | | | | | | | | | | | | | | | | | |
| L21 + L32 | | | | | | | | | | | | | | | | | | |
| L22 + L23 | | | | | | | | | | | | | | | | | | |
| L22 + L24 | | | | | | | | | | | | | | | | | | |
| L22 + L25 | | | | | | | | | | | | | | | | | | |
| L22 + L26 | | | | | | | | | | | | | | | | | | |
| L22 + L27 | | | | | | | | | | | | | | | | | | |
| L22 + L28 | | | | | | | | | | | | | | | | | | |
| L22 + L29 | | | | | | | | | | | | | | | | | | |
| L22 + L30 | | | | | | | | | | | | | | | | | | |
| L22 + L31 | | | | | | | | | | | | | | | | | | |
| L22 + L32 | | | | | | | | | | | | | | | | | | |
| L23 + L24 | | | | | | | | | | | | | | | | | | |
| L23 + L25 | | | | | | | | | | | | | | | | | | |
| L23 + L26 | | | | | | | | | | | | | | | | | | |
| L23 + L27 | | | | | | | | | | | | | | | | | | |
| L23 + L28 | | | | | | | | | | | | | | | | | | |
| L23 + L29 | | | | | | | | | | | | | | | | | | |
| L23 + L30 | | | | | | | | | | | | | | | | | | |
| L23 + L31 | | | | | | | | | | | | | | | | | | |
| L23 + L32 | | | | | | | | | | | | | | | | | | |
| L24 + L25 | | | | | | | | | | | | | | | | | | |
| L24 + L26 | | | | | | | | | | | | | | | | | | |
| L24 + L27 | | | | | | | | | | | | | | | | | | |
| L24 + L28 | | | | | | | | | | | | | | | | | | |
| L24 + L29 | | | | | | | | | | | | | | | | | | |
| L24 + L30 | | | | | | | | | | | | | | | | | | |
| L24 + L31 | | | | | | | | | | | | | | | | | | |
| L24 + L32 | | | | | | | | | | | | | | | | | | |
| L25 + L26 | | | | | | | | | | | | | | | | | | |
| L25 + L27 | | | | | | | | | | | | | | | | | | |
| L25 + L28 | | | | | | | | | | | | | | | | | | |
| L25 + L29 | | | | | | | | | | | | | | | | | | |
| L25 + L30 | | | | | | | | | | | | | | | | | | |
| L25 + L31 | | | | | | | | | | | | | | | | | | |
| L25 + L32 | | | | | | | | | | | | | | | | | | |
| L26 + L27 | | | | | | | | | | | | | | | | | | |
| L26 + L28 | | | | | | | | | | | | | | | | | | |
| L26 + L29 | | | | | | | | | | | | | | | | | | |
| L26 + L30 | | | | | | | | | | | | | | | | | | |
| L26 + L31 | | | | | | | | | | | | | | | | | | |
| L26 + L32 | | | | | | | | | | | | | | | | | | |
| L27 + L28 | | | | | | | | | | | | | | | | | | |
| L27 + L29 | | | | | | | | | | | | | | | | | | |
| L27 + L30 | | | | | | | | | | | | | | | | | | |
| L27 + L31 | | | | | | | | | | | | | | | | | | |
| L27 + L32 | | | | | | | | | | | | | | | | | | |
| L28 + L29 | | | | | | | | | | | | | | | | | | |
| L28 + L30 | | | | | | | | | | | | | | | | | | |
| L28 + L31 | | | | | | | | | | | | | | | | | | |
| L28 + L32 | | | | | | | | | | | | | | | | | | |
| L29 + L30 | | | | | | | | | | | | | | | | | | |
| L29 + L31 | | | | | | | | | | | | | | | | | | |
| L29 + L32 | | | | | | | | | | | | | | | | | | |
| L30 + L31 | | | | | | | | | | | | | | | | | | |
| L30 + L32 | | | | | | | | | | | | | | | | | | |
| L31 + L32 | | | | | | | | | | | | | | | | | | |

| | L19 | L20 | L21 | L22 | L23 | L24 | L25 | L26 | L27 | L28 | L29 | L30 | L31 | L32 |
|---|---|---|---|---|---|---|---|---|---|---|---|---|---|---|
| L1 + L2 | | | | | | | | | | | | | | |
| L1 + L3 | | | | | | | | | | | | | | |
| L1 + L4 | | | | | | | | | | | | | | |
| L1 + L5 | | | | | | | | | | | | | | |
| L1 + L6 | | | | | | | | | | | | | | |
| L1 + L7 | | | | | | | | | | | | | | |
| L1 + L8 | | | | | | | | | | | | | | |
| L1 + L9 | | | | | | | | | | | | | | |
| L1 + L10 | | | | | | | | | | | | | | |
| L1 + L11 | | | | | | | | | | | | | | |
| L1 + L12 | | | | | | | | | | | | | | |
| L1 + L13 | | | | | | | | | | | | | | |
| L1 + L14 | | | | | | | | | | | | | | |
| L1 + L15 | | | | | | | | | | | | | | |
| L1 + L16 | | | | | | | | | | | | | | |
| L1 + L17 | | | | | | | | | | | | | | |
| L1 + L18 | | | | | | | | | | | | | | |
| L1 + L19 | x | | | | | | | | | | | | | |
| L1 + L20 | ✓ | x | | | | | | | | | | | | |
| L1 + L21 | ✓ | ✓ | x | | | | | | | | | | | |
| L1 + L22 | ✓ | ✓ | ✓ | x | | | | | | | | | | |
| L1 + L23 | ✓ | ✓ | ✓ | ✓ | x | | | | | | | | | |
| L1 + L24 | ✓ | ✓ | ✓ | ✓ | ✓ | x | | | | | | | | |
| L1 + L25 | ✓ | ✓ | ✓ | ✓ | ✓ | ✓ | x | | | | | | | |
| L1 + L26 | ✓ | ✓ | ✓ | ✓ | ✓ | ✓ | ✓ | x | | | | | | |
| L1 + L27 | ✓ | ✓ | ✓ | ✓ | ✓ | ✓ | ✓ | ✓ | x | | | | | |
| L1 + L28 | ✓ | ✓ | ✓ | ✓ | ✓ | ✓ | ✓ | ✓ | ✓ | x | | | | |
| L1 + L29 | ✓ | ✓ | ✓ | ✓ | ✓ | ✓ | ✓ | ✓ | ✓ | ✓ | x | | | |
| L1 + L30 | ✓ | ✓ | ✓ | ✓ | ✓ | ✓ | ✓ | ✓ | ✓ | ✓ | ✓ | x | | |
| L1 + L31 | ✓ | ✓ | ✓ | ✓ | ✓ | ✓ | ✓ | ✓ | ✓ | ✓ | ✓ | ✓ | x | |
| L1 + L32 | ✓ | ✓ | ✓ | ✓ | ✓ | ✓ | ✓ | ✓ | ✓ | ✓ | ✓ | ✓ | ✓ | x |
| L2 + L3 | | | | | | | | | | | | | | |
| L2 + L4 | | | | | | | | | | | | | | |
| L2 + L3 | | | | | | | | | | | | | | |
| L2 + L6 | | | | | | | | | | | | | | |
| L2 + L7 | | | | | | | | | | | | | | |
| L2 + L8 | | | | | | | | | | | | | | |
| L2 + L9 | | | | | | | | | | | | | | |
| L2 + L10 | | | | | | | | | | | | | | |
| L2 + L11 | | | | | | | | | | | | | | |
| L2 + L12 | | | | | | | | | | | | | | |
| L2 + L13 | | | | | | | | | | | | | | |
| L2 + L14 | | | | | | | | | | | | | | |
| L2 + L15 | | | | | | | | | | | | | | |
| L2 + L16 | | | | | | | | | | | | | | |
| L2 + L17 | | | | | | | | | | | | | | |
| L2 + L18 | | | | | | | | | | | | | | |
| L2 + L19 | x | | | | | | | | | | | | | |
| L2 + L20 | ✓ | x | | | | | | | | | | | | |
| L2 + L21 | ✓ | ✓ | x | | | | | | | | | | | |
| L2 + L22 | ✓ | ✓ | ✓ | x | | | | | | | | | | |
| L2 + L23 | ✓ | ✓ | ✓ | ✓ | x | | | | | | | | | |
| L2 + L24 | ✓ | ✓ | ✓ | ✓ | ✓ | x | | | | | | | | |
| L2 + L25 | ✓ | ✓ | ✓ | ✓ | ✓ | ✓ | x | | | | | | | |
| L2 + L26 | ✓ | ✓ | ✓ | ✓ | ✓ | ✓ | ✓ | x | | | | | | |
| L2 + L27 | ✓ | ✓ | ✓ | ✓ | ✓ | ✓ | ✓ | ✓ | x | | | | | |
| L2 + L28 | ✓ | ✓ | ✓ | ✓ | ✓ | ✓ | ✓ | ✓ | ✓ | x | | | | |
| L2 + L29 | ✓ | ✓ | ✓ | ✓ | ✓ | ✓ | ✓ | ✓ | ✓ | ✓ | x | | | |
| L2 + L30 | ✓ | ✓ | ✓ | ✓ | ✓ | ✓ | ✓ | ✓ | ✓ | ✓ | ✓ | x | | |
| L2 + L31 | ✓ | ✓ | ✓ | ✓ | ✓ | ✓ | ✓ | ✓ | ✓ | ✓ | ✓ | ✓ | x | |
| L2 + L32 | ✓ | ✓ | ✓ | ✓ | ✓ | ✓ | ✓ | ✓ | ✓ | ✓ | ✓ | ✓ | ✓ | x |
| L3 + L4 | | | | | | | | | | | | | | |
| L3 + L5 | | | | | | | | | | | | | | |
| L3 + L6 | | | | | | | | | | | | | | |
| L3 + L7 | | | | | | | | | | | | | | |
| L3 + L8 | | | | | | | | | | | | | | |
| L3 + L9 | | | | | | | | | | | | | | |
| L3 + L10 | | | | | | | | | | | | | | |
| L3 + L11 | | | | | | | | | | | | | | |
| L3 + L12 | | | | | | | | | | | | | | |
| L3 + L13 | | | | | | | | | | | | | | |
| L3 + L14 | | | | | | | | | | | | | | |
| L3 + L15 | | | | | | | | | | | | | | |
| L3 + L16 | | | | | | | | | | | | | | |
| L3 + L17 | | | | | | | | | | | | | | |
| L3 + L18 | | | | | | | | | | | | | | |
| L3 + L19 | x | | | | | | | | | | | | | |
| L3 + L20 | ✓ | x | | | | | | | | | | | | |
| L3 + L21 | ✓ | ✓ | x | | | | | | | | | | | |
| L3 + L22 | ✓ | ✓ | ✓ | x | | | | | | | | | | |
| L3 + L23 | ✓ | ✓ | ✓ | ✓ | x | | | | | | | | | |
| L3 + L24 | ✓ | ✓ | ✓ | ✓ | ✓ | x | | | | | | | | |
| L3 + L25 | ✓ | ✓ | ✓ | ✓ | ✓ | ✓ | x | | | | | | | |
| L3 + L26 | ✓ | ✓ | ✓ | ✓ | ✓ | ✓ | ✓ | x | | | | | | |
| L3 + L27 | ✓ | ✓ | ✓ | ✓ | ✓ | ✓ | ✓ | ✓ | x | | | | | |
| L3 + L28 | ✓ | ✓ | ✓ | ✓ | ✓ | ✓ | ✓ | ✓ | ✓ | x | | | | |
| L3 + L29 | ✓ | ✓ | ✓ | ✓ | ✓ | ✓ | ✓ | ✓ | ✓ | ✓ | x | | | |
| L3 + L30 | ✓ | ✓ | ✓ | ✓ | ✓ | ✓ | ✓ | ✓ | ✓ | ✓ | ✓ | x | | |
| L3 + L31 | ✓ | ✓ | ✓ | ✓ | ✓ | ✓ | ✓ | ✓ | ✓ | ✓ | ✓ | ✓ | x | |
| L3 + L32 | ✓ | ✓ | ✓ | ✓ | ✓ | ✓ | ✓ | ✓ | ✓ | ✓ | ✓ | ✓ | ✓ | x |
| L4 + L5 | | | | | | | | | | | | | | |
| L4 + L6 | | | | | | | | | | | | | | |
| L4 + L7 | | | | | | | | | | | | | | |
| L4 + L8 | | | | | | | | | | | | | | |
| L4 + L9 | | | | | | | | | | | | | | |
| L4 + L10 | | | | | | | | | | | | | | |
| L4 + L11 | | | | | | | | | | | | | | |
| L4 + L12 | | | | | | | | | | | | | | |
| L4 + L13 | | | | | | | | | | | | | | |
| L4 + L14 | | | | | | | | | | | | | | |
| L4 + L15 | | | | | | | | | | | | | | |
| L4 + L16 | | | | | | | | | | | | | | |
| L4 + L17 | | | | | | | | | | | | | | |
| L4 + L18 | | | | | | | | | | | | | | |
| L4 + L19 | x | | | | | | | | | | | | | |
| L4 + L20 | ✓ | x | | | | | | | | | | | | |
| L4 + L21 | ✓ | ✓ | x | | | | | | | | | | | |
| L4 + L22 | ✓ | ✓ | ✓ | x | | | | | | | | | | |
| L4 + L23 | ✓ | ✓ | ✓ | ✓ | x | | | | | | | | | |
| L4 + L24 | ✓ | ✓ | ✓ | ✓ | ✓ | x | | | | | | | | |
| L4 + L25 | ✓ | ✓ | ✓ | ✓ | ✓ | ✓ | x | | | | | | | |
| L4 + L26 | ✓ | ✓ | ✓ | ✓ | ✓ | ✓ | ✓ | x | | | | | | |
| L4 + L27 | ✓ | ✓ | ✓ | ✓ | ✓ | ✓ | ✓ | ✓ | x | | | | | |
| L4 + L28 | ✓ | ✓ | ✓ | ✓ | ✓ | ✓ | ✓ | ✓ | ✓ | x | | | | |
| L4 + L29 | ✓ | ✓ | ✓ | ✓ | ✓ | ✓ | ✓ | ✓ | ✓ | ✓ | x | | | |
| L4 + L30 | ✓ | ✓ | ✓ | ✓ | ✓ | ✓ | ✓ | ✓ | ✓ | ✓ | ✓ | x | | |
| L4 + L31 | ✓ | ✓ | ✓ | ✓ | ✓ | ✓ | ✓ | ✓ | ✓ | ✓ | ✓ | ✓ | x | |
| L4 + L32 | ✓ | ✓ | ✓ | ✓ | ✓ | ✓ | ✓ | ✓ | ✓ | ✓ | ✓ | ✓ | ✓ | x |
| L5 + L6 | | | | | | | | | | | | | | |
| L5 + L7 | | | | | | | | | | | | | | |
| L5 + L8 | | | | | | | | | | | | | | |
| L5 + L9 | | | | | | | | | | | | | | |
| L5 + L10 | | | | | | | | | | | | | | |
| L5 + L11 | | | | | | | | | | | | | | |
| L5 + L12 | | | | | | | | | | | | | | |
| L5 + L13 | | | | | | | | | | | | | | |
| L5 + L14 | | | | | | | | | | | | | | |
| L5 + L15 | | | | | | | | | | | | | | |
| L5 + L16 | | | | | | | | | | | | | | |
| L5 + L17 | | | | | | | | | | | | | | |
| L5 + L18 | | | | | | | | | | | | | | |
| L5 + L19 | x | | | | | | | | | | | | | |
| L5 + L20 | ✓ | x | | | | | | | | | | | | |
| L5 + L21 | ✓ | ✓ | x | | | | | | | | | | | |
| L5 + L22 | ✓ | ✓ | ✓ | x | | | | | | | | | | |
| L5 + L23 | ✓ | ✓ | ✓ | ✓ | x | | | | | | | | | |
| L5 + L24 | ✓ | ✓ | ✓ | ✓ | ✓ | x | | | | | | | | |
| L5 + L25 | ✓ | ✓ | ✓ | ✓ | ✓ | ✓ | x | | | | | | | |
| L5 + L26 | ✓ | ✓ | ✓ | ✓ | ✓ | ✓ | ✓ | x | | | | | | |
| L5 + L27 | ✓ | ✓ | ✓ | ✓ | ✓ | ✓ | ✓ | ✓ | x | | | | | |
| L5 + L28 | ✓ | ✓ | ✓ | ✓ | ✓ | ✓ | ✓ | ✓ | ✓ | x | | | | |
| L5 + L29 | ✓ | ✓ | ✓ | ✓ | ✓ | ✓ | ✓ | ✓ | ✓ | ✓ | x | | | |
| L5 + L30 | ✓ | ✓ | ✓ | ✓ | ✓ | ✓ | ✓ | ✓ | ✓ | ✓ | ✓ | x | | |
| L5 + L31 | ✓ | ✓ | ✓ | ✓ | ✓ | ✓ | ✓ | ✓ | ✓ | ✓ | ✓ | ✓ | x | |
| L5 + L32 | ✓ | ✓ | ✓ | ✓ | ✓ | ✓ | ✓ | ✓ | ✓ | ✓ | ✓ | ✓ | ✓ | x |
| L6 + L7 | | | | | | | | | | | | | | |
| L6 + L8 | | | | | | | | | | | | | | |
| L6 + L9 | | | | | | | | | | | | | | |
| L6 + L10 | | | | | | | | | | | | | | |
| L6 + L11 | | | | | | | | | | | | | | |
| L6 + L12 | | | | | | | | | | | | | | |
| L6 + L13 | | | | | | | | | | | | | | |
| L6 + L14 | | | | | | | | | | | | | | |
| L6 + L15 | | | | | | | | | | | | | | |
| L6 + L16 | | | | | | | | | | | | | | |
| L6 + L17 | | | | | | | | | | | | | | |
| L6 + L18 | | | | | | | | | | | | | | |
| L6 + L19 | x | | | | | | | | | | | | | |
| L6 + L20 | ✓ | x | | | | | | | | | | | | |
| L6 + L21 | ✓ | ✓ | x | | | | | | | | | | | |
| L6 + L22 | ✓ | ✓ | ✓ | x | | | | | | | | | | |
| L6 + L23 | ✓ | ✓ | ✓ | ✓ | x | | | | | | | | | |
| L6 + L24 | ✓ | ✓ | ✓ | ✓ | ✓ | x | | | | | | | | |
| L6 + L25 | ✓ | ✓ | ✓ | ✓ | ✓ | ✓ | x | | | | | | | |
| L6 + L26 | ✓ | ✓ | ✓ | ✓ | ✓ | ✓ | ✓ | x | | | | | | |
| L6 + L27 | ✓ | ✓ | ✓ | ✓ | ✓ | ✓ | ✓ | ✓ | x | | | | | |
| L6 + L28 | ✓ | ✓ | ✓ | ✓ | ✓ | ✓ | ✓ | ✓ | ✓ | x | | | | |
| L6 + L29 | ✓ | ✓ | ✓ | ✓ | ✓ | ✓ | ✓ | ✓ | ✓ | ✓ | x | | | |
| L6 + L30 | ✓ | ✓ | ✓ | ✓ | ✓ | ✓ | ✓ | ✓ | ✓ | ✓ | ✓ | x | | |
| L6 + L31 | ✓ | ✓ | ✓ | ✓ | ✓ | ✓ | ✓ | ✓ | ✓ | ✓ | ✓ | ✓ | x | |
| L6 + L32 | ✓ | ✓ | ✓ | ✓ | ✓ | ✓ | ✓ | ✓ | ✓ | ✓ | ✓ | ✓ | ✓ | x |
| L7 + L8 | | | | | | | | | | | | | | |
| L7 + L9 | | | | | | | | | | | | | | |
| L7 + L10 | | | | | | | | | | | | | | |
| L7 + L11 | | | | | | | | | | | | | | |
| L7 + L12 | | | | | | | | | | | | | | |
| L7 + L13 | | | | | | | | | | | | | | |
| L7 + L14 | | | | | | | | | | | | | | |
| L7 + L15 | | | | | | | | | | | | | | |
| L7 + L16 | | | | | | | | | | | | | | |
| L7 + L17 | | | | | | | | | | | | | | |
| L7 + L18 | | | | | | | | | | | | | | |
| L7 + L19 | x | | | | | | | | | | | | | |
| L7 + L20 | ✓ | x | | | | | | | | | | | | |
| L7 + L21 | ✓ | ✓ | x | | | | | | | | | | | |
| L7 + L22 | ✓ | ✓ | ✓ | x | | | | | | | | | | |
| L7 + L23 | ✓ | ✓ | ✓ | ✓ | x | | | | | | | | | |
| L7 + L24 | ✓ | ✓ | ✓ | ✓ | ✓ | x | | | | | | | | |
| L7 + L25 | ✓ | ✓ | ✓ | ✓ | ✓ | ✓ | x | | | | | | | |
| L7 + L26 | ✓ | ✓ | ✓ | ✓ | ✓ | ✓ | ✓ | x | | | | | | |
| L7 + L27 | ✓ | ✓ | ✓ | ✓ | ✓ | ✓ | ✓ | ✓ | x | | | | | |
| L7 + L28 | ✓ | ✓ | ✓ | ✓ | ✓ | ✓ | ✓ | ✓ | ✓ | x | | | | |
| L7 + L29 | ✓ | ✓ | ✓ | ✓ | ✓ | ✓ | ✓ | ✓ | ✓ | ✓ | x | | | |
| L7 + L30 | ✓ | ✓ | ✓ | ✓ | ✓ | ✓ | ✓ | ✓ | ✓ | ✓ | ✓ | x | | |
| L7 + L31 | ✓ | ✓ | ✓ | ✓ | ✓ | ✓ | ✓ | ✓ | ✓ | ✓ | ✓ | ✓ | x | |
| L7 + L32 | ✓ | ✓ | ✓ | ✓ | ✓ | ✓ | ✓ | ✓ | ✓ | ✓ | ✓ | ✓ | ✓ | x |
| L8 + L9 | | | | | | | | | | | | | | |
| L8 + L10 | | | | | | | | | | | | | | |
| L8 + L11 | | | | | | | | | | | | | | |
| L8 + L12 | | | | | | | | | | | | | | |
| L8 + L13 | | | | | | | | | | | | | | |
| L8 + L14 | | | | | | | | | | | | | | |
| L8 + L15 | | | | | | | | | | | | | | |
| L8 + L16 | | | | | | | | | | | | | | |
| L8 + L17 | | | | | | | | | | | | | | |
| L8 + L18 | | | | | | | | | | | | | | |
| L8 + L19 | x | | | | | | | | | | | | | |
| L8 + L20 | ✓ | x | | | | | | | | | | | | |
| L8 + L21 | ✓ | ✓ | x | | | | | | | | | | | |
| L8 + L22 | ✓ | ✓ | ✓ | x | | | | | | | | | | |
| L8 + L23 | ✓ | ✓ | ✓ | ✓ | x | | | | | | | | | |
| L8 + L24 | ✓ | ✓ | ✓ | ✓ | ✓ | x | | | | | | | | |
| L8 + L25 | ✓ | ✓ | ✓ | ✓ | ✓ | ✓ | x | | | | | | | |
| L8 + L26 | ✓ | ✓ | ✓ | ✓ | ✓ | ✓ | ✓ | x | | | | | | |
| L8 + L27 | ✓ | ✓ | ✓ | ✓ | ✓ | ✓ | ✓ | ✓ | x | | | | | |
| L8 + L28 | ✓ | ✓ | ✓ | ✓ | ✓ | ✓ | ✓ | ✓ | ✓ | x | | | | |
| L8 + L29 | ✓ | ✓ | ✓ | ✓ | ✓ | ✓ | ✓ | ✓ | ✓ | ✓ | x | | | |
| L8 + L30 | ✓ | ✓ | ✓ | ✓ | ✓ | ✓ | ✓ | ✓ | ✓ | ✓ | ✓ | x | | |
| L8 + L31 | ✓ | ✓ | ✓ | ✓ | ✓ | ✓ | ✓ | ✓ | ✓ | ✓ | ✓ | ✓ | x | |
| L8 + L32 | ✓ | ✓ | ✓ | ✓ | ✓ | ✓ | ✓ | ✓ | ✓ | ✓ | ✓ | ✓ | ✓ | x |
| L9 + L10 | | | | | | | | | | | | | | |
| L9 + L11 | | | | | | | | | | | | | | |
| L9 + L12 | | | | | | | | | | | | | | |
| L9 + L13 | | | | | | | | | | | | | | |
| L9 + L14 | | | | | | | | | | | | | | |
| L9 + L15 | | | | | | | | | | | | | | |
| L9 + L16 | | | | | | | | | | | | | | |
| L9 + L17 | | | | | | | | | | | | | | |
| L9 + L18 | | | | | | | | | | | | | | |
| L9 + L19 | x | | | | | | | | | | | | | |
| L9 + L20 | ✓ | x | | | | | | | | | | | | |
| L9 + L21 | ✓ | ✓ | x | | | | | | | | | | | |
| L9 + L22 | ✓ | ✓ | ✓ | x | | | | | | | | | | |
| L9 + L23 | ✓ | ✓ | ✓ | ✓ | x | | | | | | | | | |
| L9 + L24 | ✓ | ✓ | ✓ | ✓ | ✓ | x | | | | | | | | |
| L9 + L25 | ✓ | ✓ | ✓ | ✓ | ✓ | ✓ | x | | | | | | | |
| L9 + L26 | ✓ | ✓ | ✓ | ✓ | ✓ | ✓ | ✓ | x | | | | | | |
| L9 + L27 | ✓ | ✓ | ✓ | ✓ | ✓ | ✓ | ✓ | ✓ | x | | | | | |
| L9 + L28 | ✓ | ✓ | ✓ | ✓ | ✓ | ✓ | ✓ | ✓ | ✓ | x | | | | |
| L9 + L29 | ✓ | ✓ | ✓ | ✓ | ✓ | ✓ | ✓ | ✓ | ✓ | ✓ | x | | | |
| L9 + L30 | ✓ | ✓ | ✓ | ✓ | ✓ | ✓ | ✓ | ✓ | ✓ | ✓ | ✓ | x | | |
| L9 + L31 | ✓ | ✓ | ✓ | ✓ | ✓ | ✓ | ✓ | ✓ | ✓ | ✓ | ✓ | ✓ | x | |
| L9 + L32 | ✓ | ✓ | ✓ | ✓ | ✓ | ✓ | ✓ | ✓ | ✓ | ✓ | ✓ | ✓ | ✓ | x |
| L10 + L11 | | | | | | | | | | | | | | |
| L10 + L12 | | | | | | | | | | | | | | |
| L10 + L13 | | | | | | | | | | | | | | |
| L10 + L14 | | | | | | | | | | | | | | |
| L10 + L15 | | | | | | | | | | | | | | |
| L10 + L16 | | | | | | | | | | | | | | |
| L10 + L17 | | | | | | | | | | | | | | |
| L10 + L18 | | | | | | | | | | | | | | |
| L10 + L19 | x | | | | | | | | | | | | | |
| L10 + L20 | ✓ | x | | | | | | | | | | | | |
| L10 + L21 | ✓ | ✓ | x | | | | | | | | | | | |
| L10 + L22 | ✓ | ✓ | ✓ | x | | | | | | | | | | |
| L10 + L23 | ✓ | ✓ | ✓ | ✓ | x | | | | | | | | | |
| L10 + L24 | ✓ | ✓ | ✓ | ✓ | ✓ | x | | | | | | | | |
| L10 + L25 | ✓ | ✓ | ✓ | ✓ | ✓ | ✓ | x | | | | | | | |
| L10 + L26 | ✓ | ✓ | ✓ | ✓ | ✓ | ✓ | ✓ | x | | | | | | |
| L10 + L27 | ✓ | ✓ | ✓ | ✓ | ✓ | ✓ | ✓ | ✓ | x | | | | | |
| L10 + L28 | ✓ | ✓ | ✓ | ✓ | ✓ | ✓ | ✓ | ✓ | ✓ | x | | | | |
| L10 + L29 | ✓ | ✓ | ✓ | ✓ | ✓ | ✓ | ✓ | ✓ | ✓ | ✓ | x | | | |
| L10 + L30 | ✓ | ✓ | ✓ | ✓ | ✓ | ✓ | ✓ | ✓ | ✓ | ✓ | ✓ | x | | |
| L10 + L31 | ✓ | ✓ | ✓ | ✓ | ✓ | ✓ | ✓ | ✓ | ✓ | ✓ | ✓ | ✓ | x | |
| L10 + L32 | ✓ | ✓ | ✓ | ✓ | ✓ | ✓ | ✓ | ✓ | ✓ | ✓ | ✓ | ✓ | ✓ | x |
| L11 + L12 | | | | | | | | | | | | | | |
| L11 + L13 | | | | | | | | | | | | | | |
| L11 + L14 | | | | | | | | | | | | | | |
| L11 + L15 | | | | | | | | | | | | | | |
| L11 + L16 | | | | | | | | | | | | | | |
| L11 + L17 | | | | | | | | | | | | | | |
| L11 + L18 | | | | | | | | | | | | | | |
| L11 + L19 | x | | | | | | | | | | | | | |
| L11 + L20 | ✓ | x | | | | | | | | | | | | |
| L11 + L21 | ✓ | ✓ | x | | | | | | | | | | | |
| L11 + L22 | ✓ | ✓ | ✓ | x | | | | | | | | | | |
| L11 + L23 | ✓ | ✓ | ✓ | ✓ | x | | | | | | | | | |
| L11 + L24 | ✓ | ✓ | ✓ | ✓ | ✓ | x | | | | | | | | |
| L11 + L25 | ✓ | ✓ | ✓ | ✓ | ✓ | ✓ | x | | | | | | | |
| L11 + L26 | ✓ | ✓ | ✓ | ✓ | ✓ | ✓ | ✓ | x | | | | | | |
| L11 + L27 | ✓ | ✓ | ✓ | ✓ | ✓ | ✓ | ✓ | ✓ | x | | | | | |
| L11 + L28 | ✓ | ✓ | ✓ | ✓ | ✓ | ✓ | ✓ | ✓ | ✓ | x | | | | |
| L11 + L29 | ✓ | ✓ | ✓ | ✓ | ✓ | ✓ | ✓ | ✓ | ✓ | ✓ | x | | | |
| L11 + L30 | ✓ | ✓ | ✓ | ✓ | ✓ | ✓ | ✓ | ✓ | ✓ | ✓ | ✓ | x | | |
| L11 + L31 | ✓ | ✓ | ✓ | ✓ | ✓ | ✓ | ✓ | ✓ | ✓ | ✓ | ✓ | ✓ | x | |
| L11 + L32 | ✓ | ✓ | ✓ | ✓ | ✓ | ✓ | ✓ | ✓ | ✓ | ✓ | ✓ | ✓ | ✓ | x |
| L12 + L13 | | | | | | | | | | | | | | |
| L12 + L14 | | | | | | | | | | | | | | |
| L12 + L15 | | | | | | | | | | | | | | |
| L12 + L16 | | | | | | | | | | | | | | |
| L12 + L17 | | | | | | | | | | | | | | |
| L12 + L18 | | | | | | | | | | | | | | |
| L12 + L19 | x | | | | | | | | | | | | | |
| L12 + L20 | ✓ | x | | | | | | | | | | | | |
| L12 + L21 | ✓ | ✓ | x | | | | | | | | | | | |
| L12 + L22 | ✓ | ✓ | ✓ | x | | | | | | | | | | |
| L12 + L23 | ✓ | ✓ | ✓ | ✓ | x | | | | | | | | | |
| L12 + L24 | ✓ | ✓ | ✓ | ✓ | ✓ | x | | | | | | | | |
| L12 + L25 | ✓ | ✓ | ✓ | ✓ | ✓ | ✓ | x | | | | | | | |
| L12 + L26 | ✓ | ✓ | ✓ | ✓ | ✓ | ✓ | ✓ | x | | | | | | |
| L12 + L27 | ✓ | ✓ | ✓ | ✓ | ✓ | ✓ | ✓ | ✓ | x | | | | | |
| L12 + L28 | ✓ | ✓ | ✓ | ✓ | ✓ | ✓ | ✓ | ✓ | ✓ | x | | | | |
| L12 + L29 | ✓ | ✓ | ✓ | ✓ | ✓ | ✓ | ✓ | ✓ | ✓ | ✓ | x | | | |
| L12 + L30 | ✓ | ✓ | ✓ | ✓ | ✓ | ✓ | ✓ | ✓ | ✓ | ✓ | ✓ | x | | |
| L12 + L31 | ✓ | ✓ | ✓ | ✓ | ✓ | ✓ | ✓ | ✓ | ✓ | ✓ | ✓ | ✓ | x | |
| L12 + L32 | ✓ | ✓ | ✓ | ✓ | ✓ | ✓ | ✓ | ✓ | ✓ | ✓ | ✓ | ✓ | ✓ | x |
| L13 + L14 | | | | | | | | | | | | | | |
| L13 + L15 | | | | | | | | | | | | | | |
| L13 + L16 | | | | | | | | | | | | | | |
| L13 + L17 | | | | | | | | | | | | | | |
| L13 + L18 | | | | | | | | | | | | | | |
| L13 + L19 | x | | | | | | | | | | | | | |
| L13 + L20 | ✓ | x | | | | | | | | | | | | |
| L13 + L21 | ✓ | ✓ | x | | | | | | | | | | | |
| L13 + L22 | ✓ | ✓ | ✓ | x | | | | | | | | | | |
| L13 + L23 | ✓ | ✓ | ✓ | ✓ | x | | | | | | | | | |
| L13 + L24 | ✓ | ✓ | ✓ | ✓ | ✓ | x | | | | | | | | |
| L13 + L25 | ✓ | ✓ | ✓ | ✓ | ✓ | ✓ | x | | | | | | | |
| L13 + L26 | ✓ | ✓ | ✓ | ✓ | ✓ | ✓ | ✓ | x | | | | | | |
| L13 + L27 | ✓ | ✓ | ✓ | ✓ | ✓ | ✓ | ✓ | ✓ | x | | | | | |
| L13 + L28 | ✓ | ✓ | ✓ | ✓ | ✓ | ✓ | ✓ | ✓ | ✓ | x | | | | |
| L13 + L29 | ✓ | ✓ | ✓ | ✓ | ✓ | ✓ | ✓ | ✓ | ✓ | ✓ | x | | | |
| L13 + L30 | ✓ | ✓ | ✓ | ✓ | ✓ | ✓ | ✓ | ✓ | ✓ | ✓ | ✓ | x | | |
| L13 + L31 | ✓ | ✓ | ✓ | ✓ | ✓ | ✓ | ✓ | ✓ | ✓ | ✓ | ✓ | ✓ | x | |
| L13 + L32 | ✓ | ✓ | ✓ | ✓ | ✓ | ✓ | ✓ | ✓ | ✓ | ✓ | ✓ | ✓ | ✓ | x |
| L14 + L15 | | | | | | | | | | | | | | |
| L14 + L16 | | | | | | | | | | | | | | |
| L14 + L17 | | | | | | | | | | | | | | |
| L14 + L18 | | | | | | | | | | | | | | |
| L14 + L19 | x | | | | | | | | | | | | | |
| L14 + L20 | ✓ | x | | | | | | | | | | | | |
| L14 + L21 | ✓ | ✓ | x | | | | | | | | | | | |
| L14 + L22 | ✓ | ✓ | ✓ | x | | | | | | | | | | |
| L14 + L23 | ✓ | ✓ | ✓ | ✓ | x | | | | | | | | | |
| L14 + L24 | ✓ | ✓ | ✓ | ✓ | ✓ | x | | | | | | | | |
| L14 + L25 | ✓ | ✓ | ✓ | ✓ | ✓ | ✓ | x | | | | | | | |
| L14 + L26 | ✓ | ✓ | ✓ | ✓ | ✓ | ✓ | ✓ | x | | | | | | |
| L14 + L27 | ✓ | ✓ | ✓ | ✓ | ✓ | ✓ | ✓ | ✓ | x | | | | | |
| L14 + L28 | ✓ | ✓ | ✓ | ✓ | ✓ | ✓ | ✓ | ✓ | ✓ | x | | | | |
| L14 + L29 | ✓ | ✓ | ✓ | ✓ | ✓ | ✓ | ✓ | ✓ | ✓ | ✓ | x | | | |
| L14 + L30 | ✓ | ✓ | ✓ | ✓ | ✓ | ✓ | ✓ | ✓ | ✓ | ✓ | ✓ | x | | |
| L14 + L31 | ✓ | ✓ | ✓ | ✓ | ✓ | ✓ | ✓ | ✓ | ✓ | ✓ | ✓ | ✓ | x | |
| L14 + L32 | ✓ | ✓ | ✓ | ✓ | ✓ | ✓ | ✓ | ✓ | ✓ | ✓ | ✓ | ✓ | ✓ | x |
| L15 + L16 | | | | | | | | | | | | | | |
| L15 + L17 | | | | | | | | | | | | | | |
| L15 + L18 | | | | | | | | | | | | | | |
| L15 + L19 | x | | | | | | | | | | | | | |
| L15 + L20 | ✓ | x | | | | | | | | | | | | |
| L15 + L21 | ✓ | ✓ | x | | | | | | | | | | | |
| L15 + L22 | ✓ | ✓ | ✓ | x | | | | | | | | | | |
| L15 + L23 | ✓ | ✓ | ✓ | ✓ | x | | | | | | | | | |
| L15 + L24 | ✓ | ✓ | ✓ | ✓ | ✓ | x | | | | | | | | |
| L15 + L25 | ✓ | ✓ | ✓ | ✓ | ✓ | ✓ | x | | | | | | | |
| L15 + L26 | ✓ | ✓ | ✓ | ✓ | ✓ | ✓ | ✓ | x | | | | | | |
| L15 + L27 | ✓ | ✓ | ✓ | ✓ | ✓ | ✓ | ✓ | ✓ | x | | | | | |
| L15 + L28 | ✓ | ✓ | ✓ | ✓ | ✓ | ✓ | ✓ | ✓ | ✓ | x | | | | |
| L15 + L29 | ✓ | ✓ | ✓ | ✓ | ✓ | ✓ | ✓ | ✓ | ✓ | ✓ | x | | | |
| L15 + L30 | ✓ | ✓ | ✓ | ✓ | ✓ | ✓ | ✓ | ✓ | ✓ | ✓ | ✓ | x | | |
| L15 + L31 | ✓ | ✓ | ✓ | ✓ | ✓ | ✓ | ✓ | ✓ | ✓ | ✓ | ✓ | ✓ | x | |
| L15 + L32 | ✓ | ✓ | ✓ | ✓ | ✓ | ✓ | ✓ | ✓ | ✓ | ✓ | ✓ | ✓ | ✓ | x |
| L16 + L17 | | | | | | | | | | | | | | |
| L16 + L18 | | | | | | | | | | | | | | |
| L16 + L19 | x | | | | | | | | | | | | | |
| L16 + L20 | ✓ | x | | | | | | | | | | | | |
| L16 + L21 | ✓ | ✓ | x | | | | | | | | | | | |
| L16 + L22 | ✓ | ✓ | ✓ | x | | | | | | | | | | |
| L16 + L23 | ✓ | ✓ | ✓ | ✓ | x | | | | | | | | | |
| L16 + L24 | ✓ | ✓ | ✓ | ✓ | ✓ | x | | | | | | | | |
| L16 + L25 | ✓ | ✓ | ✓ | ✓ | ✓ | ✓ | x | | | | | | | |
| L16 + L26 | ✓ | ✓ | ✓ | ✓ | ✓ | ✓ | ✓ | x | | | | | | |
| L16 + L27 | ✓ | ✓ | ✓ | ✓ | ✓ | ✓ | ✓ | ✓ | x | | | | | |
| L16 + L28 | ✓ | ✓ | ✓ | ✓ | ✓ | ✓ | ✓ | ✓ | ✓ | x | | | | |
| L16 + L29 | ✓ | ✓ | ✓ | ✓ | ✓ | ✓ | ✓ | ✓ | ✓ | ✓ | x | | | |
| L16 + L30 | ✓ | ✓ | ✓ | ✓ | ✓ | ✓ | ✓ | ✓ | ✓ | ✓ | ✓ | x | | |
| L16 + L31 | ✓ | ✓ | ✓ | ✓ | ✓ | ✓ | ✓ | ✓ | ✓ | ✓ | ✓ | ✓ | x | |
| L16 + L32 | ✓ | ✓ | ✓ | ✓ | ✓ | ✓ | ✓ | ✓ | ✓ | ✓ | ✓ | ✓ | ✓ | x |
| L17 + L18 | | | | | | | | | | | | | | |
| L17 + L19 | x | | | | | | | | | | | | | |
| L17 + L20 | ✓ | x | | | | | | | | | | | | |
| L17 + L21 | ✓ | ✓ | x | | | | | | | | | | | |
| L17 + L22 | ✓ | ✓ | ✓ | x | | | | | | | | | | |
| L17 + L23 | ✓ | ✓ | ✓ | ✓ | x | | | | | | | | | |
| L17 + L24 | ✓ | ✓ | ✓ | ✓ | ✓ | x | | | | | | | | |
| L17 + L25 | ✓ | ✓ | ✓ | ✓ | ✓ | ✓ | x | | | | | | | |
| L17 + L26 | ✓ | ✓ | ✓ | ✓ | ✓ | ✓ | ✓ | x | | | | | | |
| L17 + L27 | ✓ | ✓ | ✓ | ✓ | ✓ | ✓ | ✓ | ✓ | x | | | | | |
| L17 + L28 | ✓ | ✓ | ✓ | ✓ | ✓ | ✓ | ✓ | ✓ | ✓ | x | | | | |
| L17 + L29 | ✓ | ✓ | ✓ | ✓ | ✓ | ✓ | ✓ | ✓ | ✓ | ✓ | x | | | |
| L17 + L30 | ✓ | ✓ | ✓ | ✓ | ✓ | ✓ | ✓ | ✓ | ✓ | ✓ | ✓ | x | | |
| L17 + L31 | ✓ | ✓ | ✓ | ✓ | ✓ | ✓ | ✓ | ✓ | ✓ | ✓ | ✓ | ✓ | x | |
| L17 + L32 | ✓ | ✓ | ✓ | ✓ | ✓ | ✓ | ✓ | ✓ | ✓ | ✓ | ✓ | ✓ | ✓ | x |
| L18 + L19 | x | | | | | | | | | | | | | |
| L18 + L20 | ✓ | x | | | | | | | | | | | | |
| L18 + L21 | ✓ | ✓ | x | | | | | | | | | | | |
| L18 + L22 | ✓ | ✓ | ✓ | x | | | | | | | | | | |
| L18 + L23 | ✓ | ✓ | ✓ | ✓ | x | | | | | | | | | |
| L18 + L24 | ✓ | ✓ | ✓ | ✓ | ✓ | x | | | | | | | | |
| L18 + L25 | ✓ | ✓ | ✓ | ✓ | ✓ | ✓ | x | | | | | | | |
| L18 + L26 | ✓ | ✓ | ✓ | ✓ | ✓ | ✓ | ✓ | x | | | | | | |
| L18 + L27 | ✓ | ✓ | ✓ | ✓ | ✓ | ✓ | ✓ | ✓ | x | | | | | |
| L18 + L28 | ✓ | ✓ | ✓ | ✓ | ✓ | ✓ | ✓ | ✓ | ✓ | x | | | | |
| L18 + L29 | ✓ | ✓ | ✓ | ✓ | ✓ | ✓ | ✓ | ✓ | ✓ | ✓ | x | | | |
| L18 + L30 | ✓ | ✓ | ✓ | ✓ | ✓ | ✓ | ✓ | ✓ | ✓ | ✓ | ✓ | x | | |
| L18 + L31 | ✓ | ✓ | ✓ | ✓ | ✓ | ✓ | ✓ | ✓ | ✓ | ✓ | ✓ | ✓ | x | |
| L18 + L32 | ✓ | ✓ | ✓ | ✓ | ✓ | ✓ | ✓ | ✓ | ✓ | ✓ | ✓ | ✓ | ✓ | x |
| L19 + L20 | x | x | | | | | | | | | | | | |
| L19 + L21 | x | ✓ | x | | | | | | | | | | | |
| L19 + L22 | x | ✓ | ✓ | x | | | | | | | | | | |
| L19 + L23 | x | ✓ | ✓ | ✓ | x | | | | | | | | | |
| L19 + L24 | x | ✓ | ✓ | ✓ | ✓ | x | | | | | | | | |
| L19 + L25 | x | ✓ | ✓ | ✓ | ✓ | ✓ | x | | | | | | | |
| L19 + L26 | x | ✓ | ✓ | ✓ | ✓ | ✓ | ✓ | x | | | | | | |
| L19 + L27 | x | ✓ | ✓ | ✓ | ✓ | ✓ | ✓ | ✓ | x | | | | | |
| L19 + L28 | x | ✓ | ✓ | ✓ | ✓ | ✓ | ✓ | ✓ | ✓ | x | | | | |
| L19 + L29 | x | ✓ | ✓ | ✓ | ✓ | ✓ | ✓ | ✓ | ✓ | ✓ | x | | | |
| L19 + L30 | x | ✓ | ✓ | ✓ | ✓ | ✓ | ✓ | ✓ | ✓ | ✓ | ✓ | x | | |
| L19 + L31 | x | ✓ | ✓ | ✓ | ✓ | ✓ | ✓ | ✓ | ✓ | ✓ | ✓ | ✓ | x | |
| L19 + L32 | x | ✓ | ✓ | ✓ | ✓ | ✓ | ✓ | ✓ | ✓ | ✓ | ✓ | ✓ | ✓ | x |
| L20 + L21 | | x | x | | | | | | | | | | | |
| L20 + L22 | | x | ✓ | x | | | | | | | | | | |
| L20 + L23 | | x | ✓ | ✓ | x | | | | | | | | | |
| L20 + L24 | | x | ✓ | ✓ | ✓ | x | | | | | | | | |
| L20 + L25 | | x | ✓ | ✓ | ✓ | ✓ | x | | | | | | | |
| L20 + L26 | | x | ✓ | ✓ | ✓ | ✓ | ✓ | x | | | | | | |
| L20 + L27 | | x | ✓ | ✓ | ✓ | ✓ | ✓ | ✓ | x | | | | | |
| L20 + L28 | | x | ✓ | ✓ | ✓ | ✓ | ✓ | ✓ | ✓ | x | | | | |
| L20 + L29 | | x | ✓ | ✓ | ✓ | ✓ | ✓ | ✓ | ✓ | ✓ | x | | | |
| L20 + L30 | | x | ✓ | ✓ | ✓ | ✓ | ✓ | ✓ | ✓ | ✓ | ✓ | x | | |
| L20 + L31 | | x | ✓ | ✓ | ✓ | ✓ | ✓ | ✓ | ✓ | ✓ | ✓ | ✓ | x | |
| L20 + L32 | | x | ✓ | ✓ | ✓ | ✓ | ✓ | ✓ | ✓ | ✓ | ✓ | ✓ | ✓ | x |
| L21 + L22 | | | x | x | | | | | | | | | | |
| L21 + L23 | | | x | ✓ | x | | | | | | | | | |
| L21 + L24 | | | x | ✓ | ✓ | x | | | | | | | | |
| L21 + L25 | | | x | ✓ | ✓ | ✓ | x | | | | | | | |
| L21 + L26 | | | x | ✓ | ✓ | ✓ | ✓ | x | | | | | | |
| L21 + L27 | | | x | ✓ | ✓ | ✓ | ✓ | ✓ | x | | | | | |
| L21 + L28 | | | x | ✓ | ✓ | ✓ | ✓ | ✓ | ✓ | x | | | | |
| L21 + L29 | | | x | ✓ | ✓ | ✓ | ✓ | ✓ | ✓ | ✓ | x | | | |
| L21 + L30 | | | x | ✓ | ✓ | ✓ | ✓ | ✓ | ✓ | ✓ | ✓ | x | | |
| L21 + L31 | | | x | ✓ | ✓ | ✓ | ✓ | ✓ | ✓ | ✓ | ✓ | ✓ | x | |
| L21 + L32 | | | x | ✓ | ✓ | ✓ | ✓ | ✓ | ✓ | ✓ | ✓ | ✓ | ✓ | x |
| L22 + L23 | | | | x | x | | | | | | | | | |
| L22 + L24 | | | | x | ✓ | x | | | | | | | | |
| L22 + L25 | | | | x | ✓ | ✓ | x | | | | | | | |
| L22 + L26 | | | | x | ✓ | ✓ | ✓ | x | | | | | | |
| L22 + L27 | | | | x | ✓ | ✓ | ✓ | ✓ | x | | | | | |
| L22 + L28 | | | | x | ✓ | ✓ | ✓ | ✓ | ✓ | x | | | | |
| L22 + L29 | | | | x | ✓ | ✓ | ✓ | ✓ | ✓ | ✓ | x | | | |
| L22 + L30 | | | | x | ✓ | ✓ | ✓ | ✓ | ✓ | ✓ | ✓ | x | | |
| L22 + L31 | | | | x | ✓ | ✓ | ✓ | ✓ | ✓ | ✓ | ✓ | ✓ | x | |
| L22 + L32 | | | | x | ✓ | ✓ | ✓ | ✓ | ✓ | ✓ | ✓ | ✓ | ✓ | x |
| L23 + L24 | | | | | x | x | | | | | | | | |
| L23 + L25 | | | | | x | ✓ | x | | | | | | | |
| L23 + L26 | | | | | x | ✓ | ✓ | x | | | | | | |
| L23 + L27 | | | | | x | ✓ | ✓ | ✓ | x | | | | | |
| L23 + L28 | | | | | x | ✓ | ✓ | ✓ | ✓ | x | | | | |
| L23 + L29 | | | | | x | ✓ | ✓ | ✓ | ✓ | ✓ | x | | | |
| L23 + L30 | | | | | x | ✓ | ✓ | ✓ | ✓ | ✓ | ✓ | x | | |
| L23 + L31 | | | | | x | ✓ | ✓ | ✓ | ✓ | ✓ | ✓ | ✓ | x | |
| L23 + L32 | | | | | x | ✓ | ✓ | ✓ | ✓ | ✓ | ✓ | ✓ | ✓ | x |
| L24 + L25 | | | | | | x | x | | | | | | | |
| L24 + L26 | | | | | | x | ✓ | x | | | | | | |
| L24 + L27 | | | | | | x | ✓ | ✓ | x | | | | | |
| L24 + L28 | | | | | | x | ✓ | ✓ | ✓ | x | | | | |
| L24 + L29 | | | | | | x | ✓ | ✓ | ✓ | ✓ | x | | | |
| L24 + L30 | | | | | | x | ✓ | ✓ | ✓ | ✓ | ✓ | x | | |
| L24 + L31 | | | | | | x | ✓ | ✓ | ✓ | ✓ | ✓ | ✓ | x | |
| L24 + L32 | | | | | | x | ✓ | ✓ | ✓ | ✓ | ✓ | ✓ | ✓ | x |
| L25 + L26 | | | | | | | x | x | | | | | | |
| L25 + L27 | | | | | | | x | ✓ | x | | | | | |
| L25 + L28 | | | | | | | x | ✓ | ✓ | x | | | | |
| L25 + L29 | | | | | | | x | ✓ | ✓ | ✓ | x | | | |
| L25 + L30 | | | | | | | x | ✓ | ✓ | ✓ | ✓ | x | | |
| L25 + L31 | | | | | | | x | ✓ | ✓ | ✓ | ✓ | ✓ | x | |
| L25 + L32 | | | | | | | x | ✓ | ✓ | ✓ | ✓ | ✓ | ✓ | x |
| L26 + L27 | | | | | | | | x | x | | | | | |
| L26 + L28 | | | | | | | | x | ✓ | x | | | | |
| L26 + L29 | | | | | | | | x | ✓ | ✓ | x | | | |
| L26 + L30 | | | | | | | | x | ✓ | ✓ | ✓ | x | | |
| L26 + L31 | | | | | | | | x | ✓ | ✓ | ✓ | ✓ | x | |
| L26 + L32 | | | | | | | | x | ✓ | ✓ | ✓ | ✓ | ✓ | x |
| L27 + L28 | | | | | | | | | x | x | | | | |
| L27 + L29 | | | | | | | | | x | ✓ | x | | | |
| L27 + L30 | | | | | | | | | x | ✓ | ✓ | x | | |
| L27 + L31 | | | | | | | | | x | ✓ | ✓ | ✓ | x | |
| L27 + L32 | | | | | | | | | x | ✓ | ✓ | ✓ | ✓ | x |
| L28 + L29 | | | | | | | | | | x | x | | | |
| L28 + L30 | | | | | | | | | | x | ✓ | x | | |
| L28 + L31 | | | | | | | | | | x | ✓ | ✓ | x | |
| L28 + L32 | | | | | | | | | | x | ✓ | ✓ | ✓ | x |
| L29 + L30 | | | | | | | | | | | x | x | | |
| L29 + L31 | | | | | | | | | | | x | ✓ | x | |
| L29 + L32 | | | | | | | | | | | x | ✓ | ✓ | x |
| L30 + L31 | | | | | | | | | | | | x | x | |
| L30 + L32 | | | | | | | | | | | | x | ✓ | x |
| L31 + L32 | | | | | | | | | | | | | x | x |

### REFERENCES

[0326] 1. Schryvers A B. 04-26 1990. A Method for Isolating and Purifying Transferrin and Lactoferrin Receptor Proteins from Bacteria and the Preparation of Vaccines Containing the Same. France patent 0528787, 00528787/EP B1.
[0327] 2. Quentin-Millet M-J, Lissolo L. Apr. 15, 1993 1993. Subunit vaccine for Neisseria meningitidis infections and corresponding purified subunits. PCT patent WO 93/07172.
[0328] 3. Danve B, Lissolo L, Mignon M, Dumas P, Colombani S, Schryvers A B, Quentin-Millet M J. 1993. Transferrin-binding proteins isolated from Neisseria meningitidis elicit protective and bactericidal antibodies in laboratory animals. Vaccine 11:1214-1220.
[0329] 4. Gray-Owen S D, Schryvers A B. 1996. Bacterial transferrin and lactoferrin receptors. Trends Microbiol 4:185-191.
[0330] 5. Lo R Y C, Schryvers A B, Potter A A. 11-29 1996. Transferrin Binding Proteins of Pasteurella Haemolytica and Vaccines Containing Same patent 09720934 WO.
[0331] 6. Loosmore S, Harkness R, Schryvers A, Chong P, Gray-Owen S, Yang Y-P, Murdin A, Klein M. 06-07 1995. Transferrin receptor genes and immunogenic compositions derived therefrom patent 05922323.
[0332] 7. Schryvers A B. 06-07 1995. Vaccine for conferring bacterial immunity containing lactoferrin receptor protein patent 06060058.
[0333] 8. Myers L E, Schryvers A B, Harkness R E, Loosmore S M, Du R-P, Yang Y-P, Klein M H. 03-08 1996. DNA encoding a transferrin receptor of Moraxella patent 06090576.
[0334] 9. Potter A A, Gerlach G F, Willson P J, Rossi-Campos A. Mar. 2, 1999 1999. Actinobacillus pleuropneumoniae transferrin binding protein vaccines and uses thereof. U.S. Pat. No. 5,876,725.
[0335] 10. Potter A A, Rioux C, Schryvers A B. 03-10 2000. Cloning and Expression of Haemophilus Somnus Transferrin-Binding Proteins patent 00053765 WO.
[0336] 11. Morgenthau A, Pogoutse A, Adamiak P, Moraes T F, Schryvers A B. 2013. Bacterial receptors for host transferrin and lactoferrin: molecular mechanisms and role in host-microbe interactions. Future Microbiology 8:1575-1585.
[0337] 12. Calmettes C, Yu R-H, Silva L P, Curran D, Schriemer D C, Schryvers A B, Moraes T F. 2011. Structural variations within the transferrin binding site on transferrin binding protein, TbpB. Journal of Biological Chemistry 286:12683-12692.
[0338] 13. Moraes T F, Yu R-H, Strynadka N C, Schryvers A B. 2009. Insights into the bacterial transferrin receptor: the structure of transferrin binding protein B from Actinobacillus pleuropneumoniae. Molecular Cell 35:523-533.
[0339] 14. Calmettes C, Alcantara J, Schryvers A B, Moraes T F. 2012. The structural basis of transferrin iron sequestration by transferrin binding protein B. Nature Structural and Molecular Biology 19:358-360.
[0340] 15. Maiden M C, Ibarz-Pavon A B, Urwin R, Gray S J, Andrews N J, Clarke S C, Walker A M, Evans M R, Kroll J S, Neal K R, Ala'aldeen D A, Crook D W, Cann K, Harrison S, Cunningham R, Baxter D, Kaczmarski E, Maclennan J, Cameron J C, Stuart J M. 2008. Impact of meningococcal serogroup C conjugate vaccines on carriage and herd immunity. J Infect Dis 197:737-743.
[0341] 16. Madhi S A, Adrian P, Kuwanda L, Cutland C, Albrich W C, Klugman K P. 2007. Long-term effect of pneumococcal conjugate vaccine on nasopharyngeal colonization by Streptococcus pneumoniae—and associated interactions with Staphylococcus aureus and Haemophilus influenzae colonization—in HIV-Infected and HIV-uninfected children. J Infect Dis 196:1662-1666.
[0342] 17. Kellner J, Scheifele D, Vanderkooi O, MacDonald J, Church D. 2008. Effects of Routine Infant Vaccination with the 7-valent Pneumococcal Conjugate Vaccine on Nasopharyngeal Colonization with Streptococcus pneumoniae in Children in Calgary, Canada. Pediatr Infect Dis J 27:526-532.
[0343] 18. Moxon R, Snape M D. 2013. The price of prevention: what now for immunisation against meningococcus B? Lancet 382:369-370.
[0344] 19. Vipond C, Care R, Feavers I M. 2012. History of meningococcal vaccines and their serological correlates of protection. Vaccine 30 Suppl 2:B10-17.
[0345] 20. Schryvers A B, Morris L J. 1988. Identification and characterization of the human lactoferrin-binding protein from Neisseria meningitidis. Infection and Immunity 56:1144-1149.
[0346] 21. Schryvers A B, Morris L J. 1988. Identification and characterization of the transferrin receptor from Neisseria meningitidis. Molecular Microbiology 2:281-288.
[0347] 22. Rokbi B, Renauld-Mongenie G, Mignon M, Danve B, Poncet D, Chabenel C, Caugant D A, Quentin-Millet M-J. 2000. Allelic diversity of the two transferrin binding protein B gene isotypes among a collection of Neisseria meningitidis strains representative of serogroup B disease: implication for the composition of a recombinant TbpB-based vaccine. Infection and Immunity 68:4938-4947.
[0348] 23. Rich R L, Myszka D G. 2007. Higher-throughput, label-free, real-time molecular interaction analysis. Analytical biochemistry 361:1-6.
[0349] 24. Abdiche Y, Malashock D, Pinkerton A, Pons J. 2008. Determining kinetics and affinities of protein interactions using a parallel real-time label-free biosensor, the Octet. Analytical biochemistry 377:209-217.
[0350] 25. Velazquez-Campoy A, Leavitt S, Freire E. 2004. Characterization of protein-protein interactions by isothermal titration calorimetry. Methods Mol Biol 261:35-54.
[0351] 26. Needleman S B, Wunsch C D. 1970. A general method applicable to the search for similarities in the amino acid sequence of two proteins. Journal of molecular biology 48:443-453.
[0352] 27. Smith TFaMSW. 1981. Comparison of Biosequences. Advances in Applied Mathematics 2:482-489.
[0353] 28. Thompson J D, Higgins D G, Gibson T J. 1994. CLUSTAL W: improving the sensitivity of progressive multiple sequence alignment through sequence weighting, position-specific gap penalties and weight matrix choice. Nucleic acids research 22:4673-4680.
[0354] 29. Henikoff S, Henikoff J G. 1992. Amino acid substitution matrices from protein blocks. Proc Natl Acad Sci USA 89:10915-10919.
[0355] 30. Carrillo H, and D. Lipman. 1989. The Multiple Sequence Alignment Problem in Biology. SIAM Journal on Applied Mathematics 48:1073-1082.
[0356] 31. Devereux J, Haeberli P, Smithies O. 1984. A comprehensive set of sequence analysis programs for the VAX. Nucleic acids research 12:387-395.
[0357] 32. Altschul S F, Gish W, Miller W, Myers E W, Lipman D J. 1990. Basic local alignment search tool. Journal of Molecular Biology 215:403-410.
[0358] 33. Green M R, Sambrook J. 2012. Molecular Cloning: A Laboratory Manual. Cold Spring Harbor Laboratory Press, Cold Spring Harbor, N.Y.
[0359] 34. Gonzalez G C, Caamano D L, Schryvers A B. 1990. Identification and characterization of a porcine-specific transferrin receptor in Actinobacillus pleuropneumoniae. Molecular Microbiology 4:1173-1179.
[0360] 35. Gray-Owen S D, Loosmore S, Schryvers A B. 1995. Identification and characterization of genes encoding the human transferrin binding proteins from Haemophilus influenzae. Infection and Immunity 63:1201-1210.
[0361] 36. Gray-Owen S D, Schryvers A B. 1995. Characterization of transferrin binding proteins 1 and 2 in invasive type b and nontypable strains of Haemophilus influenzae. Infection and Immunity 63:3809-3815.
[0362] 37. Frandoloso R, Martínez S, Rodríguez-Ferri E F, García-Iglesias M J, Pérez-Martínez C, Martinez-Fernandez B, Gutierrez-Martin C B. 2011. Development and characterization of protective Haemophilus parasuis subunit vaccines based on native proteins with affinity to porcine transferrin and comparison with other subunit and commercial vaccines. Clinical and Vaccine Immunology 18:50-58.
[0363] 38. Ogunnariwo J A, Schryvers A B. 1990. Iron acquisition in Pasteurella haemolytica: Expression and identification of a bovine-specific transferrin receptor. Infection and Immunity 58:2091-2097.
[0364] 39. Ogunnariwo J A, Cheng C Y, Ford J A, Schryvers A B. 1990. Response of Haemophilus somnus to iron limitation: Expression and identification of a bovine-specific transferrin receptor. Microbial Pathogenesis 9:397-406.
[0365] 40. Myers L E, Yang Y-P, Du R-P, Wang Q, Harkness R E, Schryvers A B, Klein M H, Loosmore S M. 1998. The transferrin binding protein B of Moraxella catarrhalis elicits bactericidal antibodies and is a potential vaccine antigen. Infection and Immunity 66:4183-4192.
[0366] 41. Adamiak P, Calmettes C, Moraes T F, Schryvers A B. 2014. Patterns of structural and sequence variation within isotype lineages of the Neisseria meningitidis transferrin receptor system. Microbiology Open Submitted.
[0367] 42. Harrison O B, Maiden M C, Rokbi B. 2008. Distribution of transferrin binding protein B gene (tbpB) variants among Neisseria species. BMC Microbiol 8:66.
[0368] 43. Moretti S, Armougom F, Wallace I M, Higgins D G, Jongeneel C V, Notredame C. 2007. The M-Coffee web server: a meta-method for computing multiple sequence alignments by combining alternative alignment methods. Nucleic acids research 35:W645-648.
[0369] 44. Drummond A J, Ashton B, Buxton S, Cheung M, Cooper A, Duran C, Field M, Heled J, Kearse M, Markowitz S, Moir R, Stones-Havas S, Sturrock S, Thierer T, Wilson A. 2011. Geneious, 5.4 ed.
[0370] 45. Castresana J. 2000. Selection of Conserved Blocks from Multiple Alignments for Their Use in Phylogenetic Analysis. Mol Biol Evol 17:540-552.
[0371] 46. Guindon S, Dufayard J-F, Lefort V, Anisimova M, Hordijk W, Gascuel O. 2010. New Algorithms and Methods to Estimate Maximum-Likelihood Phylogenies: Assessing the Performance of PhyML 3.0. Systematic Biology 59:307-321.
[0372] 47. Tavare S. 1986. Some Probabilistic and Statistical Problems in the Analysis of DNA Sequences. Lectures on Mathematics in the Life Sciences 17:57-86.
[0373] 48. Dereeper A, Guignon V, Blanc G, Audic S, Buffet S, Chevenet F, Dufayard J-F, Guindon S, Lefort V, Lescot M, Claverie J-M, Gascuel O. 2008. Phylogeny.fr: robust phylogenetic analysis for the non-specialist. Nucleic Acids Research 36:W465-W469.
[0374] 49. Dereeper A, Audic S, Claverie J-M, Blanc G. 2010. BLAST-EXPLORER helps you building datasets for phylogenetic analysis. BMC Evol Biol 10:8.
[0375] 50. DeWinter L M, Schryvers A B. 2002. Methods for Manipulation of Transferrin-Binding Proteins, p. 109-120. In Pollard A J, Maiden M C (ed.), Meningococcal Vaccines: Methods and Protocols, vol. 66. Humana Press Inc., Totowa, N.J.
[0376] 51. Schryvers A B, Lee B C. 1993. Analysis of bacterial receptors for host iron binding proteins. J. Microbiol. Methods 18:255-266.
[0377] 52. Niedz R P, Sussman M R, Satterlee J S. 1995. Green Fluorescent Protein—an in-Vivo Reporter of Plant Gene-Expression. Plant Cell Rep 14:403-406.
[0378] 53. Janson J-C. 2013. Protein Purification: Principles, High Resolution Methods, and Application, vol. 54. Wiley.
[0379] 54. Wilson-Welder J H, Torres M P, Kipper M J, Mallapragada S K, Wannemuehler M J, Narasimhan B. 2009. Vaccine Adjuvants: Current Challenges and Future Approaches. J Pharm Sci-Us 98:1278-1316.
[0380] 55. Li Z, Kessler W, van den Heuvel J, Rinas U. 2011. Simple defined autoinduction medium for high-level recombinant protein production using T7-based Escherichia coli expression systems. Appl Microbiol Biotechnol 91:1203-1213.
[0381] 56. Jolley K, Maiden M. 2010. BIGSdb: Scalable analysis of bacterial genome variation at the population level. BMC Bioinformatics 11:595.
[0382] 57. Horton R M, Cai Z, Ho S N, Pease L R. 1990. Gene splicing by overlap extension: Tailor-made genes using the polymerase chain reaction. Biotechniques 8:528-535.
[0383] 58. Noinaj N, Easley N C, Oke M, Mizuno N, Gumbart J, Boura E, Steere A N, Zak O, Aisen P, Tajkhorshid E, Evans R W, Gorringe A R, Mason A B, Steven A C, Buchanan S K. 2012. Structural basis for iron piracy by pathogenic Neisseria. Nature 483:53-58.
[0384] 59. Morgenthau A, Adamiak P, Livingstone M J, Schryvers A B. 2012. The role of lactoferrin binding protein B in mediating protection against lactoferricin. Biochem Cell Biol 90:417-423.
[0385] 60. de la Fuente A J, Gutiérrez-Martín C B, Rodríguez-Barbosa J I, Martínez-Martínez S, Frandoloso R, Tejerina F, Rodriguez-Ferri E F. 2009. Blood cellular immune response in pigs immunized and challenged with Haemophilus parasuis. Res Vet Sci 86:230-234.
[0386] 61. Gray-Owen S D. 2003. Neisserial Opa proteins: impact on colonization, dissemination and immunity. Scand J Infect Dis 35:614-618.
[0387] 62. Johswich K O, McCaw S E, Islam E, Sintsova A, Gu A, Shively J E, Gray-Owen S D. 2013. In Vivo Adaptation and Persistence of Neisseria meningitidis within the Nasopharyngeal Mucosa. PLoS Pathog 9:e1003509.
[0388] 63. Mell J C, Redfield R J. 2014. Natural competence and the evolution of DNA uptake specificity. J Bacteriol 196:1471-1483.
[0389] 64. Redfield R J, Findlay W A, Bosse J, Kroll J S, Cameron A D, Nash J H. 2006. Evolution of competence and DNA uptake specificity in the Pasteurellaceae. BMC Evol Biol 6:82.
[0390] 65. Ulanova M, Tsang R, Altman E. 2012. Neglected infectious diseases in Aboriginal communities: Haemophilus influenzae serotype a and Helicobacter pylori. Vaccine 30:6960-6966.
[0391] 66. Lee I, Davies R L. 2011. Evidence for a common gene pool and frequent recombinational exchange of the tbpBA operon in Mannheimia haemolytica, Mannheimia glucosida and Bibersteinia trehalosi. Microbiology 157:123-135.

1-79. (canceled)

80: An immunogenic composition comprising a HIBP surface receptor polypeptide from a Gram-negative pathogenic bacterial species and an adjuvant wherein the polypeptide is modified in a such a manner that the value of the binding constant of the binding interaction between the native host iron binding protein and the modified HIBP surface receptor protein is at least 10× higher than the value of the binding constant of the binding interaction between the native host iron binding protein and the native HIBP surface receptor protein.

81: The immunogenic composition according to claim 80 wherein the HIPB surface receptor polypeptide is a TbpB protein comprising a C-lobe domain or an N-lobe domain, wherein the C-lobe domain or the N-lobe domain comprise a plurality of β-strands connected by a plurality of loop domains, and wherein at least one loop domain of the plurality of loop domains has been modified.

82: An immunogenic composition according to claim 81 wherein the loop domain has been modified in that one amino acid in the loop domain has been replaced.

83: An immunogenic composition according to claim 81 wherein the loop domain has been modified in that it has been removed in its entirety.

84: The immunogenic composition according to claim 83 further comprising the replacement of the loop domain with a portion of an IOM polypeptide.

85: The immunogenic composition according to claim 84 wherein the IOM polypeptide is a TbpA polypeptide or an LbpA polypeptide.

86: An immunogenic composition according to claim 81 wherein the loop domain is selected from any one of Loops L1 to Loops L32.

87: An immunogenic composition according to claim 86 wherein the loop domain is selected from any one of Loops consisting of L1, L5, L8, L12, L18, L21, L23 and L27.

88: An immunogenic composition according to claim 81 wherein the TbpB polypeptide is obtainable from a bacterial species belonging to the bacterial family of the Pasteurellaceae, Moxarellaceae or Neisseriaceae.

89: An immunogenic composition according to claim 81 wherein the TbpB polypeptide is obtainable from a bacterial species belonging to the bacterial genus of Actinobacillus, Neisseria, Haemophilus, Mannheimia, Histophilus, Pasteurella or Moraxella.

90: An immunogenic composition according to claim 81 wherein the C-lobe domain is a C-lobe domain selected from the group set forth in SEQ.ID NO: 6; SEQ.ID NO: 22; SEQ.ID NO: 34; SEQ.ID NO: 119; SEQ.ID NO: 125; SEQ.ID NO: 179 to SEQ.ID NO: 195; SEQ.ID NO: 213 to SEQ.ID NO: 218; SEQ.ID NO: 230; SEQ.ID NO: 232; SEQ.ID NO: 234 to SEQ.ID NO: 278; and SEQ.ID NO: 288 to SEQ.ID NO: 292.

91: An immunogenic composition according to claim 81 wherein the N-lobe domain is an N-lobe domain selected from the group set forth in SEQ.ID NO: 8; SEQ.ID NO: 10; SEQ.ID NO: 24; SEQ.ID NO: 26; SEQ.ID NO: 36; SEQ.ID NO: 38; SEQ.ID NO: 121; SEQ.ID NO: 127; SEQ.ID NO: 229; SEQ.ID NO: 231; and SEQ.ID NO: 233.

92: An immunogenic composition according to claim 82 wherein the immunogenic composition comprises any of the polypeptides set forth in SEQ.ID NO: 170; SEQ.ID NO: 172; SEQ.ID NO: 174; SEQ.ID NO; 176; SEQ.ID NO: 4; SEQ.ID NO; 14; SEQ.ID NO: 16; SEQ.ID NO: 18; SEQ.ID NO: 20; SEQ.ID NO: 30 and SEQ.ID NO: 32.

93: An immunogenic composition according to claim 85 wherein the TbpA and LbpA polypeptides are selected from SEQ.ID NO: 152 and SEQ.ID NO: 162.

94: An immunogenic composition according to claim 85 wherein the immunogenic composition comprises a polypeptide having the sequence set forth in SEQ.ID NO: 154; SEQ.ID NO: 156; SEQ.ID NO: 158; SEQ.ID NO: 160; SEQ.ID NO: 164, SEQ.ID NO: 166.

95: A vaccine composition comprising an immunogenic composition according to claim 80.

96: A method for preparing an immunogenic composition comprising:
(a) providing a chimeric nucleic acid sequence comprising as operably linked components:
(i) a nucleic acid sequence encoding a modified polypeptide comprising a C-lobe domain or N-lobe domain of a TbpB polypeptide from a Gram-negative pathogenic bacterial species wherein the value of the binding constant of the binding interaction between the native host iron binding protein and the modified TbpB polypeptide is at least 10× higher than the value of the binding constant of the binding interaction between the native host iron binding protein and the native TbpB polypeptide; and
(ii) a nucleic acid sequence capable of controlling expression in a recombinant host cell;
(b) introducing the chimeric nucleic acid sequence into a host cell and growing the host cell to produce the polypeptide comprising the C-lobe domain or N-lobe domain;
(c) recovering the polypeptide comprising C-lobe domain or N-lobe domain from the host cell; and
(d) preparing an immunogenic composition.

97: The method according to claim 96 wherein the modified polypeptide is a polypeptide in which at least one loop domain has been removed in its entirety.

98: A method for eliciting an immune response in a vertebrate subject, said method comprising administering to the subject:
(a) an immunogen comprising a polypeptide comprising at least two C-lobe domains or at least two N-lobe domain of an HIBP surface receptor protein from a Gram-negative pathogenic bacterial species wherein the polypeptide is unable to substantially bind host iron binding protein; or
(b) an expression vector comprising a nucleic acid sequence encoding an immunogen comprising a polypeptide comprising a C-lobe domain or N-lobe domain of an HIBP surface receptor protein from a Gram-negative bacterial species wherein the polypeptide is modified in such a manner that it is unable to substantially bind host iron binding protein; and
wherein the immunogen is administered in, or is expressed in, an amount sufficient to elicit an immune response in the vertebrate subject.

99: The method according to claim 98 wherein the immunogen comprises a polypeptide comprising a TbpB protein obtainable from a Gram-negative pathogenic bacterial species, wherein polypeptide is unable to substantially bind host iron binding protein in the manufacture of a medicament for eliciting an immune response in a vertebrate subject.

The application's sequence listing, which the Patent Office published only in electronic form, follows.

SEQUENCE LISTING (295 sequences)

SEQ ID NO: 1 - DNA, 1640 bp, Actinobacillus pleuropneumoniae
atgcattttaaacttaatccctatgcgttagcgtttacttcgctgtttcttgtcgcttgttctggcggaaaaggaagttttgatttagaagatgtccggcctaataagacaacaggcgtgtctaaagaggagtacaaggatgtagaaacagccaagaaagaaaaagaacagttaggggaattaatggaacctgctttggggtatgttgtaaaagttccggtgagttcttttgaaaataagaaagttgatatttcagatatagaagtgattacgaacggaaatttagacgatgtgccgtacaaggcaaattcatctaaatataactatccagatataaaaacaaaagattcttctcttcagtacgttcgctcaggatatgttattgatggggaacactctggttctaatgaaaagggatatgtgtattataaaggtaattcacctgcaaaagaattacccgttaatcagcttttaacttatacaggaagttgggattttacttccaatgcaaatttaaataatgaagagggaagacctaattatttaaacgacgattattatactaaatttataggtaaacgggtgggcttggtttcgggagatgcgaaacctgcaaagcataaatacactagccagtttgaagttgattttgcaactaaaaaaatgacaggtaaattatccgataaagagaaaacgatttatacagtcaatgctgatattagaggcaatcgttttacgggggctgctacagcgagtgataaaaataaagggaaaggcgaatcatataacttctttagtgccgattctcagtctttagaaggcggcttctatggtccaaaagcagaagaaatggcagggaaatttgtagctaacgacaaatctctttttgccgttttttcagcaaaacacaatggctctaatgttgacaccgttcgtattattgatgcctcaaaaattgatttaactaatttcagcatttcagaacttaacaattttggtgatgcttccgttttaattattgatgggaaaaaaataaagctagctggtagcgggtttacaaataagcacactattgaaatcaatggcaaaacaatggtagccgtagcctgctgtagtaatctggaatatatgaagtttggtcaattatggcaacaagcagagggcggaaaacccgagaataatagtttattcctacaaggcgaacgtaccgcaacagataagatgccaaaaggcggaaactataaatatattggtacttgggatgctcaggtttcaaaagaaaataactgggttgctacggcagatgatgatagaaaagctggctatcgcacagaatttgatgttgattttggcaacaaaaatttaagtggtaagttatttgataaaaacggtgtaaatcctgtgtttaccgtagatgcaaaaattgatggtaatggttttactggcaaagctaaaacctcagatgctggtttcgctctagattcaggtagttcacgttatgagaatgtgaaatttaacgatgtagcagttagtggtggcttctatggtccaacggcagcagagcttggcggacaattccaccataaatcagaaaatggcagtgtaggtgctgtctttggtgcaaaacaacaagtaaaaaa

SEQ ID NO: 2 - protein, 540 aa, Actinobacillus pleuropneumoniae
MHFKLNPYALAFTSLFLVACSGGKGSFDLEDVRPNKTTGVSKEEYKDVETAKKEKEQLGELMEPALGYVVKVPVSSFENKKVDISDIEVITNGNLDDVPYKANSSKYNYPDIKTKDSSLQYVRSGYVIDGEHSGSNEKGYVYYKGNSPAKELPVNQLLTYTGSWDFTSNANLNNEEGRPNYLNDDYYTKFIGKRVGLVSGDAKPAKHKYTSQFEVDFATKKMTGKLSDKEKTIYTVNADIRGNRFTGAATASDKNKGKGESYNFFSADSQSLEGGFYGPKAEEMAGKFVANDKSLFAVFSAKHNGSNVDTVRIIDASKIDLTNFSISELNNFGDASVLIIDGKKIKLAGSGFTNKHTIEINGKTMVAVACCSNLEYMKFGQLWQQAEGGKPENNSLFLQGERTATDKMPKGGNYKYIGTWDAQVSKENNWVATADDDRKAGYRTEFDVDFGNKNLSGKLFDKNGVNPVFTVDAKIDGNGFTGKAKTSDAGFALDSGSSRYENVKFNDVAVSGGFYGPTAAELGGQFHHKSENGSVGAVFG

SEQ ID NO: 3 - DNA, 1640 bp, Actinobacillus pleuropneumoniae
atgcattttaaacttaatccctatgcgttagcgtttacttcgctgtttcttgtcgcttgttctggcggaaaaggaagttttgatttagaagatgtccggcctaataagacaacaggcgtgtctaaagaggagtacaaggatgtagaaacagccaagaaagaaaaagaacagttaggggaattaatggaacctgctttggggtatgttgtaaaagttccggtgagttcttttgaaaataagaaagttgatatttcagatatagaagtgattacgaacggaaatttagacgatgtgccgtacaaggcaaattcatctaaatataactatccagatataaaaacaaaagattcttctcttcagtacgttcgctcaggatatgttattgatggggaacactctggttctaatgaaaagggatatgtgtattataaaggtaattcacctgcaaaagaattacccgttaatcagcttttaacttatacaggaagttgggattttacttccaatgcaaatttaaataatgaagagggaagacctaattatttaaacgacgattattatactaaagcaataggtaaacgggtgggcttggtttcgggagatgcgaaacctgcaaagcataaatacactagccagtttgaagttgattttgcaactaaaaaaatgacaggtaaattatccgataaagagaaaacgatttatacagtcaatgctgatattagaggcaatcgttttacgggggctgctacagcgagtgataaaaataaagggaaaggcgaatcatataacttctttagtgccgattctcagtctttagaaggcggcttctatggtccaaaagcagaagaaatggcagggaaatttgtagctaacgacaaatctctttttgccgttttttcagcaaaacacaatggctctaatgttgacaccgttcgtattattgatgcctcaaaaattgatttaactaatttcagcatttcagaacttaacaattttggtgatgcttccgttttaattattgatgggaaaaaaataaagctagctggtagcgggtttacaaataagcacactattgaaatcaatggcaaaacaatggtagccgtagcctgctgtagtaatctggaatatatgaagtttggtcaattatggcaacaagcagagggcggaaaacccgagaataatagtttattcctacaaggcgaacgtaccgcaacagataagatgccaaaaggcggaaactataaatatattggtacttgggatgctcaggtttcaaaagaaaataactgggttgctacggcagatgatgatagaaaagctggctatcgcacagaatttgatgttgattttggcaacaaaaatttaagtggtaagttatttgataaaaacggtgtaaatcctgtgtttaccgtagatgcaaaaattgatggtaatggttttactggcaaagctaaaacctcagatgctggtttcgctctagattcaggtagttcacgttatgagaatgtgaaatttaacgatgtagcagttagtggtggcttctatggtccaacggcagcagagcttggcggacaattccaccataaatcagaaaatggcagtgtaggtgctgtctttggtgcaaaacaacaagtaaaaaa

SEQ ID NO: 4 - protein, 540 aa, Actinobacillus pleuropneumoniae
MHFKLNPYALAFTSLFLVACSGGKGSFDLEDVRPNKTTGVSKEEYKDVETAKKEKEQLGELMEPALGYVVKVPVSSFENKKVDISDIEVITNGNLDDVPYKANSSKYNYPDIKTKDSSLQYVRSGYVIDGEHSGSNEKGYVYYKGNSPAKELPVNQLLTYTGSWDFTSNANLNNEEGRPNYLNDDYYTKAIGKRVGLVSGDAKPAKHKYTSQFEVDFATKKMTGKLSDKEKTIYTVNADIRGNRFTGAATASDKNKGKGESYNFFSADSQSLEGGFYGPKAEEMAGKFVANDKSLFAVFSAKHNGSNVDTVRIIDASKIDLTNFSISELNNFGDASVLIIDGKKIKLAGSGFTNKHTIEINGKTMVAVACCSNLEYMKFGQLWQQAEGGKPENNSLFLQGERTATDKMPKGGNYKYIGTWDAQVSKENNWVATADDDRKAGYRTEFDVDFGNKNLSGKLFDKNGVNPVFTVDAKIDGNGFTGKAKTSDAGFALDSGSSRYENVKFNDVAVSGGFYGPTAAELGGQFHHKSENGSVGAVFG

SEQ ID NO: 5 - DNA, 730 bp, Actinobacillus pleuropneumoniae
caatggctctaatgttgacaccgttcgtattattgatgcctcaaaaattgatttaactaatttcagcatttcagaacttaacaattttggtgatgcttccgttttaattattgatgggaaaaaaataaagctagctggtagcgggtttacaaataagcacactattgaaatcaatggcaaaacaatggtagccgtagcctgctgtagtaatctggaatatatgaagtttggtcaattatggcaacaagcagagggcggaaaacccgagaataatagtttattcctacaaggcgaacgtaccgcaacagataagatgccaaaaggcggaaactataaatatattggtacttgggatgctcaggtttcaaaagaaaataactgggttgctacggcagatgatgatagaaaagctggctatcgcacagaatttgatgttgattttggcaacaaaaatttaagtggtaagttatttgataaaaacggtgtaaatcctgtgtttaccgtagatgcaaaaattgatggtaatggttttactggcaaagctaaaacctcagatgctggtttcgctctagattcaggtagttcacgttatgagaatgtgaaatttaacgatgtagcagttagtggtggcttctatggtccaacggcagcagagcttggcggacaattccaccataaatcagaaaatggcagtgtaggtgctgtctttggtgcaaaacaacaagtaaaa

SEQ ID NO: 6 - protein, 240 aa, Actinobacillus pleuropneumoniae
HNGSNVDTVRIIDASKIDLTNFSISELNNFGDASVLIIDGKKIKLAGSGFTNKHTIEINGKTMVAVACCSNLEYMKFGQLWQQAEGGKPENNSLFLQGERTATDKMPKGGNYKYIGTWDAQVSKENNWVATADDDRKAGYRTEFDVDFGNKNLSGKLFDKNGVNPVFTVDAKIDGNGFTGKAKTSDAGFALDSGSSRYENVKFNDVAVSGGFYGPTAAELGGQFHHKSENGSVGAVFGAK

SEQ ID NO: 7 - DNA, 900 bp, Actinobacillus pleuropneumoniae
atgcattttaaacttaatccctatgcgttagcgtttacttcgctgtttcttgtcgcttgttctggcggaaaaggaagttttgatttagaagatgtccggcctaataagacaacaggcgtgtctaaagaggagtacaaggatgtagaaacagccaagaaagaaaaagaacagttaggggaattaatggaacctgctttggggtatgttgtaaaagttccggtgagttcttttgaaaataagaaagttgatatttcagatatagaagtgattacgaacggaaatttagacgatgtgccgtacaaggcaaattcatctaaatataactatccagatataaaaacaaaagattcttctcttcagtacgttcgctcaggatatgttattgatggggaacactctggttctaatgaaaagggatatgtgtattataaaggtaattcacctgcaaaagaattacccgttaatcagcttttaacttatacaggaagttgggattttacttccaatgcaaatttaaataatgaagagggaagacctaattatttaaacgacgattattatactaaatttataggtaaacgggtgggcttggtttcgggagatgcgaaacctgcaaagcataaatacactagccagtttgaagttgattttgcaactaaaaaaatgacaggtaaattatccgataaagagaaaacgatttatacagtcaatgctgatattagaggcaatcgttttacgggggctgctacagcgagtgataaaaataaagggaaaggcgaatcatataacttctttagtgccgattctcagtctttagaaggcggcttctatggtccaaaagcagaagaaatggcagggaaatttgtagctaacgacaaatctctttttgccgttttttca

SEQ ID NO: 8 - protein, 280 aa, Actinobacillus pleuropneumoniae
CSGGKGSFDLEDVRPNKTTGVSKEEYKDVETAKKEKEQLGELMEPALGYVVKVPVSSFENKKVDISDIEVITNGNLDDVPYKANSSKYNYPDIKTKDSSLQYVRSGYVIDGEHSGSNEKGYVYYKGNSPAKELPVNQLLTYTGSWDFTSNANLNNEEGRPNYLNDDYYTKFIGKRVGLVSGDAKPAKHKYTSQFEVDFATKKMTGKLSDKEKTIYTVNADIRGNRFTGAATASDKNKGKGESYNFFSADSQSLEGGFYGPKAEEMAGKFVANDKSLFAVF

SEQ ID NO: 9 - DNA, 744 bp, Actinobacillus pleuropneumoniae
ggatccggcgtgtcaaaagaagaatacaaagatgtggaaaccgctaaaaaagaaaaagaacaactgggcgaactgggtgaactgatggaaccggcactgggctatgtggttaaagtcccggtgtcagctggtaaaaaagtcgatatttcggacatcgaagtgattaccaacggcaatctggatgacgtgccgtacaaagccaatagctctaaatataactacccggatatcaaaacgaaagacagttccctgcagtatgtgcgtagcggctacgttatttctccggatggcggttatgtttattacaagggtaattctccggcaaaagaactgccggtcaaccaactgctgacctacacgggcagttgggattttaccagcaacgctaatctgaacgcagcacgtccggcaggtgcaggtaaacgcgttggcctggtcagcggtgatgcgaaagaacgcaaatataccagccagtttgaagtggacttcgccaccaagaaaatgacgggtaaactgagcgataaagaaaaaaccatctacacggttaatgcggacattcgtggcaaccgctttaccggtgcagctacggcgagcgataaaaatgacccgatcctgtctgccgattcacaatcgctggaaggcggtttctatggcccgaaagcagaagaaatggctggtaaattcgtggcaaatgacaaatcgctgttcgcagtcttctccgctaaacacaatggctccaatgtc

SEQ ID NO: 10 - protein, 248 aa, Actinobacillus pleuropneumoniae
GSGVSKEEYKDVETAKKEKEQLGELGELMEPALGYVVKVPVSAGKKVDISDIEVITNGNLDDVPYKANSSKYNYPDIKTKDSSLQYVRSGYVISPDGGYVYYKGNSPAKELPVNQLLTYTGSWDFTSNANLNAARPAGAGKRVGLVSGDAKERKYTSQFEVDFATKKMTGKLSDKEKTIYTVNADIRGNRFTGAATASDKNDPILSADSQSLEGGFYGPKAEEMAGKFVANDKSLFAVFSAKHNGSNV

SEQ ID NO: 11 - DNA, 1640 bp, Actinobacillus pleuropneumoniae
atgcattttaaatccgacctatatatagtagctcttacctcaactttccttgtagcttgttctggtggaaaaggtagctttgatttggatgatgttcaaccaaataaagccgttgaaccagaaaaaacaaaagtgaattataccgacgaagaaacacaaaaaaggaaaaaagaagagttagataagttgatggaacctgctttgggatatgtaacaaaaatcccagtcaatatacctagtgtaagaaaaacagaaatttcagaaattgatacagtgactgatgaatctctctctctcgttccaaatgaggacaaattaagaacaatcgctaacgagaattatgggtcggtagtaacaaaatctggaagtaacactatgaattttgttcgttctggatatacgattgatgttgttcattatggtttaagagataaaggatatgtttactacaaaggagttcatccttccaaagagctccctaaaggcaatattatcgtttatcaaggagagtgggactttacctcaaatgccgatctagatgccaaaagaccaaattacaatcctgaatttaatggctatggcgcagggcaaagagttggagttacttctgcagatgcaaaagaaagaacttatatctcgaagttcaacatagatttttcaaataagaaattgaatggtcagttacttactaaaacaaaagaaaatcaagaaaaattacgctataccgttgaagctaacattagtggcaatcgttttagaggaaaagcgactgctactgataaaacagatccgatattaggtaaagattctgagcatcttgaaggtggcttatatggtccaaaatcagaagaacttgcaggaaaatttgtagctcatgataaatctctttttgcggtattctctggcaaaagaggtaatgacgttcttgaaacagtcaagatcattgatgcctcaaaaattgatttaactacttttgaatcatcggaactcaacaatttcggcaacgctaatgtgttaattattgatggacagaaaatagatctagcaggtgcagattttaaaaatagaaaaaccgttgatatcaatggtaagacaatggtagccatagcttgctgtagtaatttggaatatatgaaatttggtcaattatggcaaaaagagggcgaacaaactaaagataatagcttattcctgcaaggtgagcgtactgccacagataaaatacccgtaggtggaaactataaatatgtaggaacctgggatgcactcgtttcaaaaggaacgaactgggtagctgaggcggataataatcgagaatcgggctatcgctcagaatttgatgttaattttggtgataaaaaagtaagcggcaagttatttgataaagggggcatagtacctgtctttatgatcaacgcagatattaaaggtaacggctttactgggacagctaacactacagatacaggctttgcgttagattcaggctctagccaacacggaaatgcggtatttagtgatataaaagtcaatggtggcttctatggtccaaccgctggagaacttggcggacaattccatcataaatcagacaatggcagtgttggcgctgtctttggtgcaaaacgacaaatagaaaa

SEQ ID NO: 12 - protein, 540 aa, Actinobacillus pleuropneumoniae
MHFKSDLYIVALTSTFLVACSGGKGSFDLDDVQPNKAVEPEKTKVNYTDEETQKRKKEELDKLMEPALGYVTKIPVNIPSVRKTEISEIDTVTDESLSLVPNEDKLRTIANENYGSVVTKSGSNTMNFVRSGYTIDVVHYGLRDKGYVYYKGVHPSKELPKGNIIVYQGEWDFTSNADLDAKRPNYNPEFNGYGAGQRVGVTSADAKERTYISKFNIDFSNKKLNGQLLTKTKENQEKLRYTVEANISGNRFRGKATATDKTDPILGKDSEHLEGGLYGPKSEELAGKFVAHDKSLFAVFSGKRGNDVLETVKIIDASKIDLTTFESSELNNFGNANVLIIDGQKIDLAGADFKNRKTVDINGKTMVAIACCSNLEYMKFGQLWQKEGEQTKDNSLFLQGERTATDKIPVGGNYKYVGTWDALVSKGTNWVAEADNNRESGYRSEFDVNFGDKKVSGKLFDKGGIVPVFMINADIKGNGFTGTANTTDTGFALDSGSSQHGNAVFSDIKVNGGFYGPTAGELGGQFHHKSDNGSVGAVFG

SEQ ID NO: 13 - DNA, 1640 bp, Actinobacillus pleuropneumoniae
atgcattttaaatccgacctatatatagtagctcttacctcaactttccttgtagcttgttctggtggaaaaggtagctttgatttggatgatgttcaaccaaataaagccgttgaaccagaaaaaacaaaagtgaattataccgacgaagaaacacaaaaaaggaaaaaagaagagttagataagttgatggaacctgctttgggatatgtaacaaaaatcccagtcaatatacctagtgtaagaaaaacagaaatttcagaaattgatacagtgactgatgaatctctctctctcgttccaaatgaggacaaattaagaacaatcgctaacgagaatgctgggtcggtagtaacaaaatctggaagtaacactatgaattttgttcgttctggatatacgattgatgttgttcattatggtttaagagataaaggatatgtttactacaaaggagttcatccttccaaagagctccctaaaggcaatattatcgtttatcaaggagagtgggactttacctcaaatgccgatctagatgccaaaagaccaaattacaatcctgaatttaatggctatggcgcagggcaaagagttggagttacttctgcagatgcaaaagaaagaacttatatctcgaagttcaacatagatttttcaaataagaaattgaatggtcagttacttactaaaacaaaagaaaatcaagaaaaattacgctataccgttgaagctaacattagtggcaatcgttttagaggaaaagcgactgctactgataaaacagatccgatattaggtaaagattctgagcatcttgaaggtggcttatatggtccaaaatcagaagaacttgcaggaaaatttgtagctcatgataaatctctttttgcggtattctctggcaaaagaggtaatgacgttcttgaaacagtcaagatcattgatgcctcaaaaattgatttaactacttttgaatcatcggaactcaacaatttcggcaacgctaatgtgttaattattgatggacagaaaatagatctagcaggtgcagattttaaaaatagaaaaaccgttgatatcaatggtaagacaatggtagccatagcttgctgtagtaatttggaatatatgaaatttggtcaattatggcaaaaagagggcgaacaaactaaagataatagcttattcctgcaaggtgagcgtactgccacagataaaatacccgtaggtggaaactataaatatgtaggaacctgggatgcactcgtttcaaaaggaacgaactgggtagctgaggcggataataatcgagaatcgggctatcgctcagaatttgatgttaattttggtgataaaaaagtaagcggcaagttatttgataaagggggcatagtacctgtctttatgatcaacgcagatattaaaggtaacggctttactgggacagctaacactacagatacaggctttgcgttagattcaggctctagccaacacggaaatgcggtatttagtgatataaaagtcaatggtggcttctatggtccaaccgctggagaacttggcggacaattccatcataaatcagacaatggcagtgttggcgctgtctttggtgcaaaacgacaaatagaaaa

SEQ ID NO: 14 - protein, 540 aa, Actinobacillus pleuropneumoniae
MHFKSDLYIVALTSTFLVACSGGKGSFDLDDVQPNKAVEPEKTKVNYTDEETQKRKKEELDKLMEPALGYVTKIPVNIPSVRKTEISEIDTVTDESLSLVPNEDKLRTIANENAGSVVTKSGSNTMNFVRSGYTIDVVHYGLRDKGYVYYKGVHPSKELPKGNIIVYQGEWDFTSNADLDAKRPNYNPEFNGYGAGQRVGVTSADAKERTYISKFNIDFSNKKLNGQLLTKTKENQEKLRYTVEANISGNRFRGKATATDKTDPILGKDSEHLEGGLYGPKSEELAGKFVAHDKSLFAVFSGKRGNDVLETVKIIDASKIDLTTFESSELNNFGNANVLIIDGQKIDLAGADFKNRKTVDINGKTMVAIACCSNLEYMKFGQLWQKEGEQTKDNSLFLQGERTATDKIPVGGNYKYVGTWDALVSKGTNWVAEADNNRESGYRSEFDVNFGDKKVSGKLFDKGGIVPVFMINADIKGNGFTGTANTTDTGFALDSGSSQHGNAVFSDIKVNGGFYGPTAGELGGQFHHKSDNGSVGAVFG

SEQ ID NO: 15 - DNA, 1640 bp, Actinobacillus pleuropneumoniae
atgcattttaaatccgacctatatatagtagctcttacctcaactttccttgtagcttgttctggtggaaaaggtagctttgatttggatgatgttcaaccaaataaagccgttgaaccagaaaaaacaaaagtgaattataccgacgaagaaacacaaaaaaggaaaaaagaagagttagataagttgatggaacctgctttgggatatgtaacaaaaatcccagtcaatatacctagtgtaagaaaaacagaaatttcagaaattgatacagtgactgatgaatctctctctctcgttccaaatgaggacaaattaagaacaatcgctaacgagaattatgggtcggtagtaacaaaatctggaagtaacactatgaattttgttcgttctggatatacgattgatgttgttcatgctggtttaagagataaaggatatgtttactacaaaggagttcatccttccaaagagctccctaaaggcaatattatcgtttatcaaggagagtgggactttacctcaaatgccgatctagatgccaaaagaccaaattacaatcctgaatttaatggctatggcgcagggcaaagagttggagttacttctgcagatgcaaaagaaagaacttatatctcgaagttcaacatagatttttcaaataagaaattgaatggtcagttacttactaaaacaaaagaaaatcaagaaaaattacgctataccgttgaagctaacattagtggcaatcgttttagaggaaaagcgactgctactgataaaacagatccgatattaggtaaagattctgagcatcttgaaggtggcttatatggtccaaaatcagaagaacttgcaggaaaatttgtagctcatgataaatctctttttgcggtattctctggcaaaagaggtaatgacgttcttgaaacagtcaagatcattgatgcctcaaaaattgatttaactacttttgaatcatcggaactcaacaatttcggcaacgctaatgtgttaattattgatggacagaaaatagatctagcaggtgcagattttaaaaatagaaaaaccgttgatatcaatggtaagacaatggtagccatagcttgctgtagtaatttggaatatatgaaatttggtcaattatggcaaaaagagggcgaacaaactaaagataatagcttattcctgcaaggtgagcgtactgccacagataaaatacccgtaggtggaaactataaatatgtaggaacctgggatgcactcgtttcaaaaggaacgaactgggtagctgaggcggataataatcgagaatcgggctatcgctcagaatttgatgttaattttggtgataaaaaagtaagcggcaagttatttgataaagggggcatagtacctgtctttatgatcaacgcagatattaaaggtaacggctttactgggacagctaacactacagatacaggctttgcgttagattcaggctctagccaacacggaaatgcggtatttagtgatataaaagtcaatggtggcttctatggtccaaccgctggagaacttggcggacaattccatcataaatcagacaatggcagtgttggcgctgtctttggtgcaaaacgacaaatagaaaa

SEQ ID NO: 16 - protein, 540 aa, Actinobacillus pleuropneumoniae
MHFKSDLYIVALTSTFLVACSGGKGSFDLDDVQPNKAVEPEKTKVNYTDEETQKRKKEELDKLMEPALGYVTKIPVNIPSVRKTEISEIDTVTDESLSLVPNEDKLRTIANENAGSVVTKSGSNTMNFVRSGYTIDVVHAGLRDKGYVYYKGVHPSKELPKGNIIVYQGEWDFTSNADLDAKRPNYNPEFNGYGAGQRVGVTSADAKERTYISKFNIDFSNKKLNGQLLTKTKENQEKLRYTVEANISGNRFRGKATATDKTDPILGKDSEHLEGGLYGPKSEELAGKFVAHDKSLFAVFSGKRGNDVLETVKIIDASKIDLTTFESSELNNFGNANVLIIDGQKIDLAGADFKNRKTVDINGKTMVAIACCSNLEYMKFGQLWQKEGEQTKDNSLFLQGERTATDKIPVGGNYKYVGTWDALVSKGTNWVAEADNNRESGYRSEFDVNFGDKKVSGKLFDKGGIVPVFMINADIKGNGFTGTANTTDTGFALDSGSSQHGNAVFSDIKVNGGFYGPTAGELGGQFHHKSDNGSVGAVFG

SEQ ID NO: 17 - DNA, 1640 bp, Actinobacillus pleuropneumoniae
atgcattttaaatccgacctatatatagtagctcttacctcaactttccttgtagcttgttctggtggaaaaggtagctttgatttggatgatgttcaaccaaataaagccgttgaaccagaaaaaacaaaagtgaattataccgacgaagaaacacaaaaaaggaaaaaagaagagttagataagttgatggaacctgctttgggatatgtaacaaaaatcccagtcaatatacctagtgtaagaaaaacagaaatttcagaaattgatacagtgactgatgaatctctctctctcgttccaaatgaggacaaattaagaacaatcgctaacgagaattatgggtcggtagtaacaaaatctggaagtaacactatgaattttgttcgttctggatatacgattgatgttgttcattatggtttaagagataaaggatatgtttactacaaaggagttcatccttccaaagagctccctaaaggcaatattatcgtttatcaaggagagtgggactttacctcaaatgccgatctagatgccaaaagaccaaattacaatcctgaatttaatggcgcaggcgcagggcaaagagttggagttacttctgcagatgcaaaagaaagaacttatatctcgaagttcaacatagatttttcaaataagaaattgaatggtcagttacttactaaaacaaaagaaaatcaagaaaaattacgctataccgttgaagctaacattagtggcaatcgttttagaggaaaagcgactgctactgataaaacagatccgatattaggtaaagattctgagcatcttgaaggtggcttatatggtccaaaatcagaagaacttgcaggaaaatttgtagctcatgataaatctctttttgcggtattctctggcaaaagaggtaatgacgttcttgaaacagtcaagatcattgatgcctcaaaaattgatttaactacttttgaatcatcggaactcaacaatttcggcaacgctaatgtgttaattattgatggacagaaaatagatctagcaggtgcagattttaaaaatagaaaaaccgttgatatcaatggtaagacaatggtagccatagcttgctgtagtaatttggaatatatgaaatttggtcaattatggcaaaaagagggcgaacaaactaaagataatagcttattcctgcaaggtgagcgtactgccacagataaaatacccgtaggtggaaactataaatatgtaggaacctgggatgcactcgtttcaaaaggaacgaactgggtagctgaggcggataataatcgagaatcgggctatcgctcagaatttgatgttaattttggtgataaaaaagtaagcggcaagttatttgataaagggggcatagtacctgtctttatgatcaacgcagatattaaaggtaacggctttactgggacagctaacactacagatacaggctttgcgttagattcaggctctagccaacacggaaatgcggtatttagtgatataaaagtcaatggtggcttctatggtccaaccgctggagaacttggcggacaattccatcataaatcagacaatggcagtgttggcgctgtctttggtgcaaaacgacaaatagaaaa

SEQ ID NO: 18 - protein, 540 aa, Actinobacillus pleuropneumoniae
MHFKSDLYIVALTSTFLVACSGGKGSFDLDDVQPNKAVEPEKTKVNYTDEETQKRKKEELDKLMEPALGYVTKIPVNIPSVRKTEISEIDTVTDESLSLVPNEDKLRTIANENYGSVVTKSGSNTMNFVRSGYTIDVVHYGLRDKGYVYYKGVHPSKELPKGNIIVYQGEWDFTSNADLDAKRPNYNPEFNGAGAGQRVGVTSADAKERTYISKFNIDFSNKKLNGQLLTKTKENQEKLRYTVEANISGNRFRGKATATDKTDPILGKDSEHLEGGLYGPKSEELAGKFVAHDKSLFAVFSGKRGNDVLETVKIIDASKIDLTTFESSELNNFGNANVLIIDGQKIDLAGADFKNRKTVDINGKTMVAIACCSNLEYMKFGQLWQKEGEQTKDNSLFLQGERTATDKIPVGGNYKYVGTWDALVSKGTNWVAEADNNRESGYRSEFDVNFGDKKVSGKLFDKGGIVPVFMINADIKGNGFTGTANTTDTGFALDSGSSQHGNAVFSDIKVNGGFYGPTAGELGGQFHHKSDNGSVGAVFG

SEQ ID NO: 19 - DNA, 1640 bp, Actinobacillus pleuropneumoniae
atgcattttaaatccgacctatatatagtagctcttacctcaactttccttgtagcttgttctggtggaaaaggtagctttgatttggatgatgttcaaccaaataaagccgttgaaccagaaaaaacaaaagtgaattataccgacgaagaaacacaaaaaaggaaaaaagaagagttagataagttgatggaacctgctttgggatatgtaacaaaaatcccagtcaatatacctagtgtaagaaaaacagaaatttcagaaattgatacagtgactgatgaatctctctctctcgttccaaatgaggacaaattaagaacaatcgctaacgagaattatgggtcggtagtaacaaaatctggaagtaacactatgaattttgttcgttctggatatacgattgatgttgttcattatggtttaagagataaaggatatgtttactacaaaggagttcatccttccaaagagctccctaaaggcaatattatcgtttatcaaggagagtgggactttacctcaaatgccgatctagatgccaaaagaccaaattacaatcctgaatttaatggctatggcgcagggcaagaggttggagttacttctgcagatgcaaaagaaagaacttatatctcgaagttcaacatagatttttcaaataagaaattgaatggtcagttacttactaaaacaaaagaaaatcaagaaaaattacgctataccgttgaagctaacattagtggcaatcgttttagaggaaaagcgactgctactgataaaacagatccgatattaggtaaagattctgagcatcttgaaggtggcttatatggtccaaaatcagaagaacttgcaggaaaatttgtagctcatgataaatctctttttgcggtattctctggcaaaagaggtaatgacgttcttgaaacagtcaagatcattgatgcctcaaaaattgatttaactacttttgaatcatcggaactcaacaatttcggcaacgctaatgtgttaattattgatggacagaaaatagatctagcaggtgcagattttaaaaatagaaaaaccgttgatatcaatggtaagacaatggtagccatagcttgctgtagtaatttggaatatatgaaatttggtcaattatggcaaaaagagggcgaacaaactaaagataatagcttattcctgcaaggtgagcgtactgccacagataaaatacccgtaggtggaaactataaatatgtaggaacctgggatgcactcgtttcaaaaggaacgaactgggtagctgaggcggataataatcgagaatcgggctatcgctcagaatttgatgttaattttggtgataaaaaagtaagcggcaagttatttgataaagggggcatagtacctgtctttatgatcaacgcagatattaaaggtaacggctttactgggacagctaacactacagatacaggctttgcgttagattcaggctctagccaacacggaaatgcggtatttagtgatataaaagtcaatggtggcttctatggtccaaccgctggagaacttggcggacaattccatcataaatcagacaatggcagtgttggcgctgtctttggtgcaaaacgacaaatagaaaa

SEQ ID NO: 20 - protein, 540 aa, Actinobacillus pleuropneumoniae
MHFKSDLYIVALTSTFLVACSGGKGSFDLDDVQPNKAVEPEKTKVNYTDEETQKRKKEELDKLMEPALGYVTKIPVNIPSVRKTEISEIDTVTDESLSLVPNEDKLRTIANENYGSVVTKSGSNTMNFVRSGYTIDVVHYGLRDKGYVYYKGVHPSKELPKGNIIVYQGEWDFTSNADLDAKRPNYNPEFNGYGAGQEVGVTSADAKERTYISKFNIDFSNKKLNGQLLTKTKENQEKLRYTVEANISGNRFRGKATATDKTDPILGKDSEHLEGGLYGPKSEELAGKFVAHDKSLFAVFSGKRGNDVLETVKIIDASKIDLTTFESSELNNFGNANVLIIDGQKIDLAGADFKNRKTVDINGKTMVAIACCSNLEYMKFGQLWQKEGEQTKDNSLFLQGERTATDKIPVGGNYKYVGTWDALVSKGTNWVAEADNNRESGYRSEFDVNFGDKKVSGKLFDKGGIVPVFMINADIKGNGFTGTANTTDTGFALDSGSSQHGNAVFSDIKVNGGFYGPTAGELGGQFHHKSDNGSVGAVFG

SEQ ID NO: 21 - DNA, 730 bp, Actinobacillus pleuropneumoniae
aggtaatgacgttcttgaaacagtcaagatcattgatgcctcaaaaattgatttaactacttttgaatcatcggaactcaacaatttcggcaacgctaatgtgttaattattgatggacagaaaatagatctagcaggtgcagattttaaaaatagaaaaaccgttgatatcaatggtaagacaatggtagccatagcttgctgtagtaatttggaatatatgaaatttggtcaattatggcaaaaagagggcgaacaaactaaagataatagcttattcctgcaaggtgagcgtactgccacagataaaatacccgtaggtggaaactataaatatgtaggaacctgggatgcactcgtttcaaaaggaacgaactgggtagctgaggcggataataatcgagaatcgggctatcgctcagaatttgatgttaattttggtgataaaaaagtaagcggcaagttatttgataaagggggcatagtacctgtctttatgatcaacgcagatattaaaggtaacggctttactgggacagctaacactacagatacaggctttgcgttagattcaggctctagccaacacggaaatgcggtatttagtgatataaaagtcaatggtggcttctatggtccaaccgctggagaacttggcggacaattccatcataaatcagacaatggcagtgttggcgctgtctttggtgcaaaacgacaaatagaaaaa

SEQ ID NO: 22 - protein, 240 aa, Actinobacillus pleuropneumoniae
RGNDVLETVKIIDASKIDLTTFESSELNNFGNANVLIIDGQKIDLAGADFKNRKTVDINGKTMVAIACCSNLEYMKFGQLWQKEGEQTKDNSLFLQGERTATDKIPVGGNYKYVGTWDALVSKGTNWVAEADNNRESGYRSEFDVNFGDKKVSGKLFDKGGIVPVFMINADIKGNGFTGTANTTDTGFALDSGSSQHGNAVFSDIKVNGGFYGPTAGELGGQFHHKSDNGSVGAVFGAKR

SEQ ID NO: 23 - DNA, 910 bp, Actinobacillus pleuropneumoniae
atgcattttaaatccgacctatatatagtagctcttacctcaactttccttgtagcttgttctggtggaaaaggtagctttgatttggatgatgttcaaccaaataaagccgttgaaccagaaaaaacaaaagtgaattataccgacgaagaaacacaaaaaaggaaaaaagaagagttagataagttgatggaacctgctttgggatatgtaacaaaaatcccagtcaatatacctagtgtaagaaaaacagaaatttcagaaattgatacagtgactgatgaatctctctctctcgttccaaatgaggacaaattaagaacaatcgctaacgagaattatgggtcggtagtaacaaaatctggaagtaacactatgaattttgttcgttctggatatacgattgatgttgttcattatggtttaagagataaaggatatgtttactacaaaggagttcatccttccaaagagctccctaaaggcaatattatcgtttatcaaggagagtgggactttacctcaaatgccgatctagatgccaaaagaccaaattacaatcctgaatttaatggctatggcgcagggcaaagagttggagttacttctgcagatgcaaaagaaagaacttatatctcgaagttcaacatagatttttcaaataagaaattgaatggtcagttacttactaaaacaaaagaaaatcaagaaaaattacgctataccgttgaagctaacattagtggcaatcgttttagaggaaaagcgactgctactgataaaacagatccgatattaggtaaagattctgagcatcttgaaggtggcttatatggtccaaaatcagaagaacttgcaggaaaatttgtagctcatgataaatctctttttgcggtattctctggcaaaa

SEQ ID NO: 24 - protein, 280 aa, Actinobacillus pleuropneumoniae
CSGGKGSFDLDDVQPNKAVEPEKTKVNYTDEETQKRKKEELDKLMEPALGYVTKIPVNIPSVRKTEISEIDTVTDESLSLVPNEDKLRTIANENYGSVVTKSGSNTMNFVRSGYTIDVVHYGLRDKGYVYYKGVHPSKELPKGNIIVYQGEWDFTSNADLDAKRPNYNPEFNGYGAGQRVGVTSADAKERTYISKFNIDFSNKKLNGQLLTKTKENQEKLRYTVEANISGNRFRGKATATDKTDPILGKDSEHLEGGLYGPKSEELAGKFVAHDKSLFAV

SEQ ID NO: 25 - DNA, 615 bp, Actinobacillus pleuropneumoniae
ggatccaagttgatggaacctgctttgggatatgtaacaaaaatcccagtcggtccgggtagcgaaatttcagaaattgatacagtgactgatgaatctgtgtctggtgcgccgggtgttgttaactctggatatacgattgatgttgttcattatggtttaagagataaaggttctgtgtcttataaaggagttcatccttccaaagagctccctaaaggcaatattatcgtttatcaaggagagtgggactttacctcaaatgccggtgcggcgggtagagttggagttacttctgcagatgcaaaagaaagaacttatatctcgaagttcaacatagatttttcaaataagaaattgaatggtcagttacttactaaaacaaaagaaaatcaagaaaaattacgctataccgttgaagctaacattagtggcaatcgttttagaggaaaagcgactgctactgataaaacagatccgatattaggtaaagattctgagcatcttgaaggtggcttatatggtccaaaatcagaagaacttgcaggaaaatttgtagctcatgataaatctctttttgcggtattctctggcaaaagaggtaatgacgttctt

SEQ ID NO: 26 - protein, 205 aa, Actinobacillus pleuropneumoniae
GSKLMEPALGYVTKIPVGPGSEISEIDTVTDESVSGAPGVVNSGYTIDVVHYGLRDKGSVSYKGVHPSKELPKGNIIVYQGEWDFTSNAGAAGRVGVTSADAKERTYISKFNIDFSNKKLNGQLLTKTKENQEKLRYTVEANISGNRFRGKATATDKTDPILGKDSEHLEGGLYGPKSEELAGKFVAHDKSLFAVFSGKRGNDVL

SEQ ID NO: 27 - DNA, 1790 bp, Actinobacillus suis
atgcattttaaacttaatccctatgcgttagcgtttacttcgctgtttcttgtcgcttgttctggcggaaaaggaggttttgatttagaagatgttcggccaaatcaaactgcaaaagcagaaaaagcaacaacctcttatcaagatgaggaaacgaagaaaaagacaaaggaagaattagataagttgatggagcctactttgggagttgaggcaaagatacctcgccggaatagagctttatttgataaagaaggaaatcgaaaagcaacacctgatacaactgatgaattatctgaagcacaaattatggcgatttggaatgaaaatatagatgaaattcctcacttgaaagagttaaacgataaaacaacgagtggtttaatttatcactctcacgatggtaaacaggaggacaaaaaacgaaatttacaatatgtgcgttcaggctatgttttcgatgaatcttatagtgaaatagtaaaaaataagaatggtgtaccctatatttttaaaaatgggatcgatggttacatttactatttagggacaagcccgtcaaaagaactccctaaaggaaataaagttacctataaaggtacttgggatttcaccagcgatgttaaaacaagctacgagttaagtggatttagtgatgctggtaatggtaaaaatgttgcagctacatctatttcggataatgtcaatcgagatcataaagttggtgaaaaactaggtgataatgaagttaaaggggtagctcattctagtgaatttgcagtagattttgataacaaaaaattgacaggtagtttatatcgtaatggttatatcaacagaaataaagcgcaagaagtaacgaaacgctatagcattgaagctgatataacaggcaaccggtttacaggaaaagccaaagcagaaaaagcaggtgatccgatctttactgattcaaattatcttgaagggggattctatggtcctaaagctgaagaaatggcagggaaatttttcacaaataataaatctctctttgcagtatttgcagctaaaagtgaaaacggcgagacgaccacagaacgaatcattgatgcaactaaaattgatttaacccaatttaatgctaaagaactcaacaattttggtgatgcctctgttttaattattgatggacaaaaaatagatctagcaggtgtcaattttaaaaatagtaaaacggttgaaatcaacggcaaaacaatggtagccgtagcttgctgtagtaatctggaatatatgaaatttggtcaattgtggcaaaaagagggcaaacaacaagttaaagataatagtttattcctacaaggtgaacgtactgcaacggataaaatgcccgcaggaggtaactataagtatgttggaacttgggatgcactcgtatctaaagggacgaactggatagcggaagcagataataatcgagaatcgggctatcgcactgaatttgatgttaattttagtgataaaaaagtaaacggtaagttatttgataaaggcggtgtaaatcctgtatttaccgtagatgcgacaattaatggtaatggctttatcggcagtgcgaaaacctctgatagtggctttgctttagatgcaggctctagccaacacggaaatgcggtatttagtgatataaaagtcaatggtggcttctatggtccaaccgctggagaacttggcggacaattccatcataaatcagacaatggcagtgttggcgctgtctttggtgcaaaacgacaaatagaaaaata

SEQ ID NO: 28 - protein, 590 aa, Actinobacillus suis
MHFKLNPYALAFTSLFLVACSGGKGGFDLEDVRPNQTAKAEKATTSYQDEETKKKTKEELDKLMEPTLGVEAKIPRRNRALFDKEGNRKATPDTTDELSEAQIMAIWNENIDEIPHLKELNDKTTSGLIYHSHDGKQEDKKRNLQYVRSGYVFDESYSEIVKNKNGVPYIFKNGIDGYIYYLGTSPSKELPKGNKVTYKGTWDFTSDVKTSYELSGFSDAGNGKNVAATSISDNVNRDHKVGEKLGDNEVKGVAHSSEFAVDFDNKKLTGSLYRNGYINRNKAQEVTKRYSIEADITGNRFTGKAKAEKAGDPIFTDSNYLEGGFYGPKAEEMAGKFFTNNKSLFAVFAAKSENGETTTERIIDATKIDLTQFNAKELNNFGDASVLIIDGQKIDLAGVNFKNSKTVEINGKTMVAVACCSNLEYMKFGQLWQKEGKQQVKDNSLFLQGERTATDKMPAGGNYKYVGTWDALVSKGTNWIAEADNNRESGYRTEFDVNFSDKKVNGKLFDKGGVNPVFTVDATINGNGFIGSAKTSDSGFALDAGSSQHGNAVFSDIKVNGGFYGPTAGELGGQFHHKSDNGSVGAVFGA

SEQ ID NO: 29 - DNA, 1790 bp, Actinobacillus suis
atgcattttaaacttaatccctatgcgttagcgtttacttcgctgtttcttgtcgcttgttctggcggaaaaggaggttttgatttagaagatgttcggccaaatcaaactgcaaaagcagaaaaagcaacaacctcttatcaagatgaggaaacgaagaaaaagacaaaggaagaattagataagttgatggagcctactttgggagttgaggcaaagatacctcgccggaatagagctttagcagataaagaaggaaatcgaaaagcaacacctgatacaactgatgaattatctgaagcacaaattatggcgatttggaatgaaaatatagatgaaattcctcacttgaaagagttaaacgataaaacaacgagtggtttaatttatcactctcacgatggtaaacaggaggacaaaaaacgaaatttacaatatgtgcgttcaggctatgttttcgatgaatcttatagtgaaatagtaaaaaataagaatggtgtaccctatatttttaaaaatgggatcgatggttacatttactatttagggacaagcccgtcaaaagaactccctaaaggaaataaagttacctataaaggtacttgggatttcaccagcgatgttaaaacaagctacgagttaagtggatttagtgatgctggtaatggtaaaaatgttgcagctacatctatttcggataatgtcaatcgagatcataaagttggtgaaaaactaggtgataatgaagttaaaggggtagctcattctagtgaatttgcagtagattttgataacaaaaaattgacaggtagtttatatcgtaatggttatatcaacagaaataaagcgcaagaagtaacgaaacgctatagcattgaagctgatataacaggcaaccggtttacaggaaaagccaaagcagaaaaagcaggtgatccgatctttactgattcaaattatcttgaagggggattctatggtcctaaagctgaagaaatggcagggaaatttttcacaaataataaatctctctttgcagtatttgcagctaaaagtgaaaacggcgagacgaccacagaacgaatcattgatgcaactaaaattgatttaacccaatttaatgctaaagaactcaacaattttggtgatgcctctgttttaattattgatggacaaaaaatagatctagcaggtgtcaattttaaaaatagtaaaacggttgaaatcaacggcaaaacaatggtagccgtagcttgctgtagtaatctggaatatatgaaatttggtcaattgtggcaaaaagagggcaaacaacaagttaaagataatagtttattcctacaaggtgaacgtactgcaacggataaaatgcccgcaggaggtaactataagtatgttggaacttgggatgcactcgtatctaaagggacgaactggatagcggaagcagataataatcgagaatcgggctatcgcactgaatttgatgttaattttagtgataaaaaagtaaacggtaagttatttgataaaggcggtgtaaatcctgtatttaccgtagatgcgacaattaatggtaatggctttatcggcagtgcgaaaacctctgatagtggctttgctttagatgcaggctctagccaacacggaaatgcggtatttagtgatataaaagtcaatggtggcttctatggtccaaccgctggagaacttggcggacaattccatcataaatcagacaatggcagtgttggcgctgtctttggtgcaaaacgacaaatagaaaaata

SEQ ID NO: 30 - protein, 590 aa, Actinobacillus suis
MHFKLNPYALAFTSLFLVACSGGKGGFDLEDVRPNQTAKAEKATTSYQDEETKKKTKEELDKLMEPTLGVEAKIPRRNRALADKEGNRKATPDTTDELSEAQIMAIWNENIDEIPHLKELNDKTTSGLIYHSHDGKQEDKKRNLQYVRSGYVFDESYSEIVKNKNGVPYIFKNGIDGYIYYLGTSPSKELPKGNKVTYKGTWDFTSDVKTSYELSGFSDAGNGKNVAATSISDNVNRDHKVGEKLGDNEVKGVAHSSEFAVDFDNKKLTGSLYRNGYINRNKAQEVTKRYSIEADITGNRFTGKAKAEKAGDPIFTDSNYLEGGFYGPKAEEMAGKFFTNNKSLFAVFAAKSENGETTTERIIDATKIDLTQFNAKELNNFGDASVLIIDGQKIDLAGVNFKNSKTVEINGKTMVAVACCSNLEYMKFGQLWQKEGKQQVKDNSLFLQGERTATDKMPAGGNYKYVGTWDALVSKGTNWIAEADNNRESGYRTEFDVNFSDKKVNGKLFDKGGVNPVFTVDATINGNGFIGSAKTSDSGFALDAGSSQHGNAVFSDIKVNGGFYGPTAGELGGQFHHKSDNGSVGAVFGA

SEQ ID NO: 31 - DNA, 1790 bp, Actinobacillus suis
atgcattttaaacttaatccctatgcgttagcgtttacttcgctgtttcttgtcgcttgttctggcggaaaaggaggttttgatttagaagatgttcggccaaatcaaactgcaaaagcagaaaaagcaacaacctcttatcaagatgaggaaacgaagaaaaagacaaaggaagaattagataagttgatggagcctactttgggagttgaggcaaagatacctcgccggaatagagctttatttgataaagaaggaaatcgaaaagcaacacctgatacaactgatgaattatctgaagcacaaattatggcgatttggaatgaaaatatagatgaaattcctcacttgaaagagttaaacgataaaacaacgagtggtttaatttatcactctcacgatggtaaacaggaggacaaaaaacgaaatttacaatatgtgcgttcaggctatgttttcgatgaatcttatagtgaaatagtaaaaaataagaatggtgtaccctatattgcaaaaaatgggatcgatggttacatttactatttagggacaagcccgtcaaaagaactccctaaaggaaataaagttacctataaaggtacttgggatttcaccagcgatgttaaaacaagctacgagttaagtggatttagtgatgctggtaatggtaaaaatgttgcagctacatctatttcggataatgtcaatcgagatcataaagttggtgaaaaactaggtgataatgaagttaaaggggtagctcattctagtgaatttgcagtagattttgataacaaaaaattgacaggtagtttatatcgtaatggttatatcaacagaaataaagcgcaagaagtaacgaaacgctatagcattgaagctgatataacaggcaaccggtttacaggaaaagccaaagcagaaaaagcaggtgatccgatctttactgattcaaattatcttgaagggggattctatggtcctaaagctgaagaaatggcagggaaatttttcacaaataataaatctctctttgcagtatttgcagctaaaagtgaaaacggcgagacgaccacagaacgaatcattgatgcaactaaaattgatttaacccaatttaatgctaaagaactcaacaattttggtgatgcctctgttttaattattgatggacaaaaaatagatctagcaggtgtcaattttaaaaatagtaaaacggttgaaatcaacggcaaaacaatggtagccgtagcttgctgtagtaatctggaatatatgaaatttggtcaattgtggcaaaaagagggcaaacaacaagttaaagataatagtttattcctacaaggtgaacgtactgcaacggataaaatgcccgcaggaggtaactataagtatgttggaacttgggatgcactcgtatctaaagggacgaactggatagcggaagcagataataatcgagaatcgggctatcgcactgaatttgatgttaattttagtgataaaaaagtaaacggtaagttatttgataaaggcggtgtaaatcctgtatttaccgtagatgcgacaattaatggtaatggctttatcggcagtgcgaaaacctctgatagtggctttgctttagatgcaggctctagccaacacggaaatgcggtatttagtgatataaaagtcaatggtggcttctatggtccaaccgctggagaacttggcggacaattccatcataaatcagacaatggcagtgttggcgctgtctttggtgcaaaacgacaaatagaaaaata

SEQ ID NO: 32 - protein, 590 aa, Actinobacillus suis
MHFKLNPYALAFTSLFLVACSGGKGGFDLEDVRPNQTAKAEKATTSYQDEETKKKTKEELDKLMEPTLGVEAKIPRRNRALFDKEGNRKATPDTTDELSEAQIMAIWNENIDEIPHLKELNDKTTSGLIYHSHDGKQEDKKRNLQYVRSGYVFDESYSEIVKNKNGVPYIAKNGIDGYIYYLGTSPSKELPKGNKVTYKGTWDFTSDVKTSYELSGFSDAGNGKNVAATSISDNVNRDHKVGEKLGDNEVKGVAHSSEFAVDFDNKKLTGSLYRNGYINRNKAQEVTKRYSIEADITGNRFTGKAKAEKAGDPIFTDSNYLEGGFYGPKAEEMAGKFFTNNKSLFAVFAAKSENGETTTERIIDATKIDLTQFNAKELNNFGDASVLIIDGQKIDLAGVNFKNSKTVEINGKTMVAVACCSNLEYMKFGQLWQKEGKQQVKDNSLFLQGERTATDKMPAGGNYKYVGTWDALVSKGTNWIAEADNNRESGYRTEFDVNFSDKKVNGKLFDKGGVNPVFTVDATINGNGFIGSAKTSDSGFALDAGSSQHGNAVFSDIKVNGGFYGPTAGELGGQFHHKSDNGSVGAVFGA

SEQ ID NO: 33 - DNA, 730 bp, Actinobacillus suis
tgaaaacggcgagacgaccacagaacgaatcattgatgcaactaaaattgatttaacccaatttaatgctaaagaactcaacaattttggtgatgcctctgttttaattattgatggacaaaaaatagatctagcaggtgtcaattttaaaaatagtaaaacggttgaaatcaacggcaaaacaatggtagccgtagcttgctgtagtaatctggaatatatgaaatttggtcaattgtggcaaaaagagggcaaacaacaagttaaagataatagtttattcctacaaggtgaacgtactgcaacggataaaatgcccgcaggaggtaactataagtatgttggaacttgggatgcactcgtatctaaagggacgaactggatagcggaagcagataataatcgagaatcgggctatcgcactgaatttgatgttaattttagtgataaaaaagtaaacggtaagttatttgataaaggcggtgtaaatcctgtatttaccgtagatgcgacaattaatggtaatggctttatcggcagtgcgaaaacctctgatagtggctttgctttagatgcaggctctagccaacacggaaatgcggtatttagtgatataaaagtcaatggtggcttctatggtccaaccgctggagaacttggcggacaattccatcataaatcagacaatggcagtgttggcgctgtctttggtgcaaaacgacaaatagaa

SEQ ID NO: 34 - protein, 240 aa, Actinobacillus suis
SENGETTTERIIDATKIDLTQFNAKELNNFGDASVLIIDGQKIDLAGVNFKNSKTVEINGKTMVAVACCSNLEYMKFGQLWQKEGKQQVKDNSLFLQGERTATDKMPAGGNYKYVGTWDALVSKGTNWIAEADNNRESGYRTEFDVNFSDKKVNGKLFDKGGVNPVFTVDATINGNGFIGSAKTSDSGFALDAGSSQHGNAVFSDIKVNGGFYGPTAGELGGQFHHKSDNGSVGAVFGAK

SEQ ID NO: 35 - DNA, 1050 bp, Actinobacillus suis
atgcattttaaacttaatccctatgcgttagcgtttacttcgctgtttcttgtcgcttgttctggcggaaaaggaggttttgatttagaagatgttcggccaaatcaaactgcaaaagcagaaaaagcaacaacctcttatcaagatgaggaaacgaagaaaaagacaaaggaagaattagataagttgatggagcctactttgggagttgaggcaaagatacctcgccggaatagagctttatttgataaagaaggaaatcgaaaagcaacacctgatacaactgatgaattatctgaagcacaaattatggcgatttggaatgaaaatatagatgaaattcctcacttgaaagagttaaacgataaaacaacgagtggtttaatttatcactctcacgatggtaaacaggaggacaaaaaacgaaatttacaatatgtgcgttcaggctatgttttcgatgaatcttatagtgaaatagtaaaaaataagaatggtgtaccctatatttttaaaaatgggatcgatggttacatttactatttagggacaagcccgtcaaaagaactccctaaaggaaataaagttacctataaaggtacttgggatttcaccagcgatgttaaaacaagctacgagttaagtggatttagtgatgctggtaatggtaaaaatgttgcagctacatctatttcggataatgtcaatcgagatcataaagttggtgaaaaactaggtgataatgaagttaaaggggtagctcattctagtgaatttgcagtagattttgataacaaaaaattgacaggtagtttatatcgtaatggttatatcaacagaaataaagcgcaagaagtaacgaaacgctatagcattgaagctgatataacaggcaaccggtttacaggaaaagccaaagcagaaaaagcaggtgatccgatctttactgattcaaattatcttgaagggggattctatggtcctaaagctgaagaaatggcagggaaatttttcacaaataataaatctctctttgcagtatttgcagct

SEQ ID NO: 36 - protein, 330 aa, Actinobacillus suis
CSGGKGGFDLEDVRPNQTAKAEKATTSYQDEETKKKTKEELDKLMEPTLGVEAKIPRRNRALFDKEGNRKATPDTTDELSEAQIMAIWNENIDEIPHLKELNDKTTSGLIYHSHDGKQEDKKRNLQYVRSGYVFDESYSEIVKNKNGVPYIFKNGIDGYIYYLGTSPSKELPKGNKVTYKGTWDFTSDVKTSYELSGFSDAGNGKNVAATSISDNVNRDHKVGEKLGDNEVKGVAHSSEFAVDFDNKKLTGSLYRNGYINRNKAQEVTKRYSIEADITGNRFTGKAKAEKAGDPIFTDSNYLEGGFYGPKAEEMAGKFFTNNKSLFAVFA

SEQ ID NO: 37 - DNA, 675 bp, Actinobacillus suis
ggatccaagttgatggagcctactttgggagttgaggcaaagatacctcgccggggtgcagcgacaactgatgaattatctcaaattatggcgatttggaatgaaaatatagatgaaattcctcacttgaaagagttaaacgataaaacaacgagtggtttaatttatcactctgcgggttctaatttacaatatgtgcgttcaggctatgttttcgatgaatctccgggtgggatcgatggttacatttactatttagggacaagcccgtcaaaagaactccctaaaggaaataaagttacctataaaggtacttgggatttcaccagcgatgttaaaggtaaaaatgttgcagctacatctatttcggataatgtcggtgctggtcattctagtgaatttgcagtagattttgataacaaaaaattgacaggtagtttatatcgtaatccgggtgcggtaacgaaacgctatagcattgaagctgatataacaggcaaccgttttagaggaaaagccaaagcagaaaaagcaggtgatccgatctttactgattcaaattatcttgaagggggattctatggtcctaaagctgaagaaatggcagggaaatttttcacaaataataaatctctctttgcagtatttgcagctaaaagtgaaaacggcgagacg

SEQ ID NO: 38 - protein, 195 aa, Actinobacillus suis
GSKLMEPTLGVEAKIPRRGAATTDELSQIMAIWNENIDEIPHLKELNDKTTSGLIYHSAGSNLQYVRSGYVFDESPGGIDGYIYYLGTSPSKELPKGNKVTYKGTWDFTSDVKGKNVAATSISDNVGAGHSSEFAVDFDNKKLTGSLYRNPIFTDSNYLEGGFYGPKAEEMAGKFFTNNKSLFAVFAAKSENGET

SEQ ID NO: 39 - DNA, 2154 bp, Actinobacillus pleuropneumoniae
  misc_feature: Organism: Actinobacillus suis (as well)
gacaccgttcgtattattgatgcctcaaaaattgatttaactaatttcagcatttcagaacttaacaattttggtgatgcttccgttttaattattgatgggaaaaaaataaagctagctggtagcgggtttacaaataagcacactattgaaatcaatggcaaaacaatggtagccgtagcctgctgtagtaatctggaatatatgaagtttggtcaattatggcaacaagcagagggcggaaaacccgagaataatagtttattcctacaaggcgaacgtaccgcaacagataagatgccaaaaggcggaaactataaatatattggtacttgggatgctcaggtttcaaaagaaaataactgggttgctacggcagatgatgatagaaaagctggctatcgcacagaatttgatgttgattttggcaacaaaaatttaagtggtaagttatttgataaaaacggtgtaaatcctgtgtttaccgtagatgcaaaaattgatggtaatggttttactggcaaagctaaaacctcagatgctggtttcgctctagattcaggtagttcacgttatgagaatgtgaaatttaacgatgtagcagttagtggtggcttctatggtccaacggcagcagagcttggcggacaattccaccataaatcagaaaatggcagtgtaggtgctgtctttggtgcaaaacaacaagtaaaaaaacttgaaacagtcaagatcattgatgcctcaaaaattgatttaactacttttgaatcatcggaactcaacaatttcggcaacgctaatgtgttaattattgatggacagaaaatagatctagcaggtgcagattttaaaaatagaaaaaccgttgatatcaatggtaagacaatggtagccatagcttgctgtagtaatttggaatatatgaaatttggtcaattatggcaaaaagagggcgaacaaactaaagataatagcttattcctgcaaggtgagcgtactgccacagataaaatacccgtaggtggaaactataaatatgtaggaacctgggatgcactcgtttcaaaaggaacgaactgggtagctgaggcggataataatcgagaatcgggctatcgctcagaatttgatgttaattttggtgataaaaaagtaagcggcaagttatttgataaagggggcatagtacctgtctttatgatcaacgcagatattaaaggtaacggctttactgggacagctaacactacagatacaggctttgcgttagattcaggctctagccaacacggaaatgcggtatttagtgatataaaagtcaatggtggcttctatggtccaaccgctggagaacttggcggacaattccatcataaatcagacaatggcagtgttggcgctgtctttggtgcaaaacgacaaatagaaaaaacgaccacagaacgaatcattgatgcaactaaaattgatttaacccaatttaatgctaaagaactcaacaattttggtgatgcctctgttttaattattgatggacaaaaaatagatctagcaggtgtcaattttaaaaatagtaaaacggttgaaatcaacggcaaaacaatggtagccgtagcttgctgtagtaatctggaatatatgaaatttggtcaattgtggcaaaaagagggcaaacaacaagttaaagataatagtttattcctacaaggtgaacgtactgcaacggataaaatgcccgcaggaggtaactataagtatgttggaacttgggatgcactcgtatctaaagggacgaactggatagcggaagcagataataatcgagaatcgggctatcgcactgaatttgatgttaattttagtgataaaaaagtaaacggtaagttatttgataaaggcggtgtaaatcctgtatttaccgtagatgcgacaattaatggtaatggctttatcggcagtgcgaaaacctctgatagtggctttgctttagatgcaggctctagccaacacggaaatgcggtatttagtgatataaaagtcaatggtggcttctatggtccaaccgctggagaacttggcggacaattccatcataaatcagacaatggcagtgttggcgctgtctttggtgcaaaacgacaaatagaaaaa

SEQ ID NO: 40 - protein, 718 aa, Actinobacillus pleuropneumoniae
  MISC_FEATURE: Organism: Actinobacillus suis (as well)
DTVRIIDASKIDLTNFSISELNNFGDASVLIIDGKKIKLAGSGFTNKHTIEINGKTMVAVACCSNLEYMKFGQLWQQAEGGKPENNSLFLQGERTATDKMPKGGNYKYIGTWDAQVSKENNWVATADDDRKAGYRTEFDVDFGNKNLSGKLFDKNGVNPVFTVDAKIDGNGFTGKAKTSDAGFALDSGSSRYENVKFNDVAVSGGFYGPTAAELGGQFHHKSENGSVGAVFGAKQQVKKLETVKIIDASKIDLTTFESSELNNFGNANVLIIDGQKIDLAGADFKNRKTVDINGKTMVAIACCSNLEYMKFGQLWQKEGEQTKDNSLFLQGERTATDKIPVGGNYKYVGTWDALVSKGTNWVAEADNNRESGYRSEFDVNFGDKKVSGKLFDKGGIVPVFMINADIKGNGFTGTANTTDTGFALDSGSSQHGNAVFSDIKVNGGFYGPTAGELGGQFHHKSDNGSVGAVFGAKRQIEKTTTERIIDATKIDLTQFNAKELNNFGDASVLIIDGQKIDLAGVNFKNSKTVEINGKTMVAVACCSNLEYMKFGQLWQKEGKQQVKDNSLFLQGERTATDKMPAGGNYKYVGTWDALVSKGTNWIAEADNNRESGYRTEFDVNFSDKKVNGKLFDKGGVNPVFTVDATINGNGFIGSAKTSDSGFALDAGSSQHGNAVFSDIKVNGGFYGPTAGELGGQFHHKSDNGSVGAVFGAKRQIEK

SEQ ID NO: 41 - DNA, 51 bp, Actinobacillus pleuropneumoniae
aaagttccggtgagttcttttgaaaataagaaagttgatatttcagatata

SEQ ID NO: 42 - protein, 17 aa, Actinobacillus pleuropneumoniae
KVPVSSFENKKVDISDI

SEQ ID NO: 43 - DNA, 27 bp, Actinobacillus pleuropneumoniae
acgaacggaaatttagacgatgtgccg

SEQ ID NO: 44 - protein, 9 aa, Actinobacillus pleuropneumoniae
TNGNLDDVP

SEQ ID NO: 45 - DNA, 12 bp, Actinobacillus pleuropneumoniae
aaatataactat

SEQ ID NO: 46 - protein, 4 aa, Actinobacillus pleuropneumoniae
KYNY

SEQ ID NO: 47 - DNA, 27 bp, Actinobacillus pleuropneumoniae
aaaacaaaagattcttctcttcagtac

SEQ ID NO: 48 - protein, 9 aa, Actinobacillus pleuropneumoniae
KTKDSSLQY

SEQ ID NO: 49 - DNA, 30 bp, Actinobacillus pleuropneumoniae
gatggggaacactctggttctaatgaaaag

SEQ ID NO: 50 - protein, 10 aa, Actinobacillus pleuropneumoniae
DGEHSGSNEK

SEQ ID NO: 51 - DNA, 18 bp, Actinobacillus pleuropneumoniae
ggtaattcacctgcaaaa

SEQ ID NO: 52 - protein, 6 aa, Actinobacillus pleuropneumoniae
GNSPAK

SEQ ID NO: 53 - DNA, 15 bp, Actinobacillus pleuropneumoniae
cccgttaatcagctt

SEQ ID NO: 54 - protein, 5 aa, Actinobacillus pleuropneumoniae
PVNQL

SEQ ID NO: 55 - DNA, 123 bp, Actinobacillus pleuropneumoniae
tccaatgcaaatttaaataatgaagagggaagacctaattatttaaacgacgattattatactaaatttataggtaaacgggtgggcttggtttcgggagatgcgaaacctgcaaagcataaa

SEQ ID NO: 56 - protein, 41 aa, Actinobacillus pleuropneumoniae
SNANLNNEEGRPNYLNDDYYTKFIGKRVGLVSGDAKPAKHK

SEQ ID NO: 57 - DNA, 18 bp, Actinobacillus pleuropneumoniae
gattttgcaactaaaaaa

SEQ ID NO: 58 - protein, 6 aa, Actinobacillus pleuropneumoniae
DFATKK

SEQ ID NO: 59 - DNA, 12 bp, Actinobacillus pleuropneumoniae
gataaagagaaa

SEQ ID NO: 60 - protein, 4 aa, Actinobacillus pleuropneumoniae
DKEK

SEQ ID NO: 61 - DNA, 12 bp, Actinobacillus pleuropneumoniae
agaggcaatcgt

SEQ ID NO: 62 - protein, 4 aa, Actinobacillus pleuropneumoniae
RGNR

SEQ ID NO: 63 - DNA, 54 bp, Actinobacillus pleuropneumoniae
gcgagtgataaaaataaagggaaaggcgaatcatataacttctttagtgccgat

SEQ ID NO: 64 - protein, 18 aa, Actinobacillus pleuropneumoniae
ASDKNKGKGESYNFFSAD

SEQ ID NO: 65 - DNA, 21 bp, Actinobacillus pleuropneumoniae
tatggtccaaaagcagaagaa

SEQ ID NO: 66 - protein, 7 aa, Actinobacillus pleuropneumoniae
YGPKAEE

SEQ ID NO: 67 - DNA, 21 bp, Actinobacillus pleuropneumoniae
gtagctaacgacaaatctctt

SEQ ID NO: 68 - protein, 7 aa, Actinobacillus pleuropneumoniae
VANDKSL

SEQ ID NO: 69 - DNA, 21 bp, Actinobacillus pleuropneumoniae
cacaatggctctaatgttgac

SEQ ID NO: 70 - protein, 7 aa, Actinobacillus pleuropneumoniae
HNGSNVD

SEQ ID NO: 71 - DNA, 6 bp, Actinobacillus pleuropneumoniae
cgtatt

SEQ ID NO: 72 - protein, 2 aa, Actinobacillus pleuropneumoniae
RI

SEQ ID NO: 73 - DNA, 15 bp, Actinobacillus pleuropneumoniae
gatttaactaatttc

SEQ ID NO: 74 - protein, 5 aa, Actinobacillus pleuropneumoniae
DLTNF

SEQ ID NO: 75 - DNA, 27 bp, Actinobacillus pleuropneumoniae
gaacttaacaattttggtgatgcttcc

SEQ ID NO: 76 - protein, 9 aa, Actinobacillus pleuropneumoniae
ELNNFGDAS

SEQ ID NO: 77 - DNA, 9 bp, Actinobacillus pleuropneumoniae
attgatggg

SEQ ID NO: 78 - protein, 3 aa, Actinobacillus pleuropneumoniae
IDG

SEQ ID NO: 79 - DNA, 24 bp, Actinobacillus pleuropneumoniae
aagctagctggtagcgggtttaca

SEQ ID NO: 80 - protein, 8 aa, Actinobacillus pleuropneumoniae
KLAGSGFT

SEQ ID NO: 81 - DNA, 12 bp, Actinobacillus pleuropneumoniae
atcaatggcaaa

SEQ ID NO: 82 - protein, 4 aa, Actinobacillus pleuropneumoniae
INGK

SEQ ID NO: 83 - DNA, 24 bp, Actinobacillus pleuropneumoniae
tgctgtagtaatctggaatatatg

SEQ ID NO: 84 - protein, 8 aa, Actinobacillus pleuropneumoniae
CCSNLEYM

SEQ ID NO: 85 - DNA, 24 bp, Actinobacillus pleuropneumoniae
caacaagcagagggcggaaaaccc

SEQ ID NO: 86 - protein, 8 aa, Actinobacillus pleuropneumoniae
QQAEGGKP

SEQ ID NO: 87 - DNA, 42 bp, Actinobacillus pleuropneumoniae
ggcgaacgtaccgcaacagataagatgccaaaaggcggaaac

SEQ ID NO: 88 - protein, 14 aa, Actinobacillus pleuropneumoniae
GERTATDKMPKGGN

SEQ ID NO: 89 - DNA, 15 bp, Actinobacillus pleuropneumoniae
tcaaaagaaaataac

SEQ ID NO: 90 - protein, 5 aa, Actinobacillus pleuropneumoniae
SKENN

SEQ ID NO: 91 - DNA, 36 bp, Actinobacillus pleuropneumoniae
gctacggcagatgatgatagaaaagctggctatcgc

SEQ ID NO: 92 - protein, 12 aa, Actinobacillus pleuropneumoniae
ATADDDRKAGYR

SEQ ID NO: 93 - DNA, 18 bp, Actinobacillus pleuropneumoniae
gattttggcaacaaaaat

SEQ ID NO: 94 - protein, 6 aa, Actinobacillus pleuropneumoniae
DFGNKN

SEQ ID NO: 95 - DNA, 33 bp, Actinobacillus pleuropneumoniae
ttatttgataaaaacggtgtaaatcctgtgttt

SEQ ID NO: 96 - protein, 11 aa, Actinobacillus pleuropneumoniae
LFDKNGVNPVF

SEQ ID NO: 97 - DNA, 12 bp, Actinobacillus pleuropneumoniae
gatggtaatggt

SEQ ID NO: 98 - protein, 4 aa, Actinobacillus pleuropneumoniae
DGNG

SEQ ID NO: 99 - DNA, 69 bp, Actinobacillus pleuropneumoniae
aaaacctcagatgctggtttcgctctagattcaggtagttcacgttatgagaatgtgaaatttaacgat

SEQ ID NO: 100 - protein, 23 aa, Actinobacillus pleuropneumoniae
KTSDAGFALDSGSSRYENVKFND

SEQ ID NO: 101 - DNA, 12 bp, Actinobacillus pleuropneumoniae
tatggtccaacg

SEQ ID NO: 102 - protein, 4 aa, Actinobacillus pleuropneumoniae
YGPT

SEQ ID NO: 103 - DNA, 12 bp, Actinobacillus pleuropneumoniae
tcagaaaatggc

SEQ ID NO: 104 - protein, 4 aa, Actinobacillus pleuropneumoniae
SENG

SEQ ID NO: 105 - DNA, 6 bp, Actinobacillus pleuropneumoniae
aaaaaa

SEQ ID NO: 106 - protein, 2 aa, Actinobacillus pleuropneumoniae
KK

SEQ ID NO: 107 - protein, 540 aa, Haemophilus parasuis
MHFKLNPYALAFTSLFLVACSGGKGSFDLEDVQPNKTTGMSKEEYKDVETAKKEKEQLGELMEPALGYVVKVPVSQNGVRRTEISNLEAITDEDLNKIPNHDIIKDVAYQNYGELVDKTAAKKMTYVRSGYAIDVFHYGTRDKGYVFYKGITPSKELPQGPVLTYQGEWDFTSDANLDAKRPNSNPEFNGYGPGQRIAATSADAKGRTYTSEFEVDFSTKKLKGKLSSKTANAESLERYSIEAELKGNRFRGKAIAKNDSDASLGKSSDNLEGGFYGPKAEELAGKFITNDKSLFAVFSAKHNGSNVDTVRIIDASKIDLTNFSISELTNFGDASVLIIDGQKMELAGSGFTNKHTIEINGKTMVAVACCSNLEYMKFGQLWQQAEGEKAKDNSLFLQGERTATDKMPKGGNYKYIGTWDAQVSKENNWVATADDDRKAGYRTEFDVDFGNKNLSGKLFDKNGVNPVFTVDAKINGNGFTGKAKTSDAGFALDSGSSRYDNVKFSDVAVNGGFYGPTAAELGGQFFHKSDNGSVGAVFGA

SEQ ID NO: 108 - protein, 590 aa, Haemophilus parasuis
MHFKLNPYALAFTSLFLVACSGGKGSFDLEDVQPNQTAKVEKATTSYQDEETKKKTKEELDKLMEPALGYETQILRRNRAPKTETGEPRNERAVGLSEDQITKLYQENIEIIPHLDELNRRTTSYEVYHSHDGKGLDKKRDLKYVRSGYVYDGAFREVQRNEHGFHVFKQGIDGYIYYLGVIPSKELPKGKIVTYKGSWDFVSNINLDREIDGFDTSGDGKNVSATSITETVNREHKIGDKVGENEVKGVAHSSEFAVDFDNKKLTGSLYRNGYINRNKAQEVTKRYSIEADIAGNRFRGKAKAEKADDPIFTNSDYLEGGIYGPKAEEMAGKFFTNNKSLFAVFAAKSENGETTTERIIDATKIDLTQFNAKELNNFGDASVLIIDGQKMDLAGVDFKNSKTVEINGKTMVAVACCSNLEYMKFGQLWQKEGEQQVKDNSLFLQGERTATDKMPAGGNYKYVGTWDALVSKGTNWIAEADNNRESGYRTEFDVNFSDKKVNGKLFDKGGVNPVFTVDATINGNGFIGSAKTSDSGFALDSGSSQHGNAVFSNVDVKGGFYGPTAGELGGQFHHKSDNGSVGAVFGAKRQ

SEQ ID NO: 109 - protein, 590 aa, Haemophilus parasuis
MHFKLNPYALAFTSLFLVACSGGKGSFDLEDVQPNQTAKVEKATTSYQDEETKKKTKEELDKLMEPALGYETQILRRNRAPKTETGEPRNERAVGLSEDQITKLYQENIEIIPHLDELNRRTTSDEVYHSHDGKRLDKKRDLKYVRSGYVYDGSFREIQRNDTGFYVFKQGIDGYVYYLGVIPSKELPKGKVVSYKGTWDFVSNINLDREIDGFDTAGDGKNVSATSITETVNREHKIGDKVGENEVKGVAHSSEFAVDFDNKKLTGSLYRNGYINRNKAQEVTKRYSIEADIAGNRFRGKAKAEKADDPIFTNSDYLEGGFYGPKAEEMAGKFFTNNKSLFAVFAAKSENGETTTERIIDATKIDLTQFNAKELNNFGDASVLIIDGQKMDLAGVDFKNSKTVEINGKTMVAVACCSNLEYMKFGQLWQKEGEQQVKDNSLFLQGERTATDKMPAGGNYKYVGTWDALVSKGTNWIAEADNNRESGYRTEFDVNFSDKKVNGKLFDKGGVNPVFTVDATINGNGFIGSAKTSDSGFALDAGSSQHGNAVFSNVDVKGGFYGPTAGELGGQFHHKSDNGSVGAVFGAKRQ

SEQ ID NO: 110 - protein, 540 aa, Haemophilus parasuis
MHFKSDLYIVALTSTFLVACSGGKGSFDLDDVQPNKAVEPEKTKVNYTDEETQKRKKEELDKLMEPALGYVTKIPVNIPSVRKTEISEIDTVTDESLSLVPNEDKLRTIANENYGSVVTKSGSNTMNFVRSGYTIDVDHYGLRDKGYVYYKGVHPSKELPKGNIIVYQGEWDFTSNADLDAKRPNYNPEFNGYGAGQRVGVTSADAKERTYISKFNIDFSNKKLNGQLLTKTKENQEKLRYTVEANISGNRFRGKATATDKTDPILGKDSEHLEGGLYGPKSEELAGKFVAHDKSLFAVFSGKRGNDVLETVKIIDASKIDLTTFESSELNNFGNANVLIIDGQKIDLAGADFKNRKTVDINGKTMVAIACCSNLEYMKFGQLWQKEGEQTKDNSLFLQGERTATDKIPVGGNYKYVGTWDALVSKGTNWVAEADNNRESGYRSEFDVNFGDKKVSGKLFDKGGIVPVFMINADIKGNGFTGTANTTDTGFALDSGSSQHGNAVFSDIKVNGGFYGPTAGELGGQFHHKSDNGSVGAVFG

SEQ ID NO: 111 - protein, 590 aa, Haemophilus parasuis
MHFKLNPYALAFTSLFLVACSGGKGSFDLEDVQPNQTAKVEKATTSYQDEETKKKTKEELDKLMEPALGYETQILRRNRAPKTETGEPRNERAVGLSEDQITKLYQENIEIIPHLDELNRRTTSDEVYHSHDGKRLDKKRDLKYVRSGYVYDGSFREIQRNDTGFYVFKQGIDGYVYYLGVTPSKELPKGKVVSYKGTWDFVSNINLDREIDGFDTSGDGKNVSATSITETVNREHKIGDKVGENEVKGVAHSSEFAVDFDNKKLTGSLYRNGYINRNKAQEVTKRYSIEADIAGNRFRGKAKAEKADDPIFTNSDYLEGGFYGPKAEEMAGKFFTNNKSLFAVFAAKSENGETTTERIIDATKIDLTQFNAKELNNFGDASVLIIDGQKMDLAGADFKNRKTVDINGKTMVAIACCSNLEYMKFGQLWQKEGEQQVKDNSLFLQGERTATDKMPAGGNYKYVGTWDALVSKGTNWIAEADNNRESGYRTEFDVNFSDKKVNGKLFDKGGVNPVFTVDATINGNGFIGSAKTSDSGFALDAGSSQHGNAVFSNVDVKGGFYGPTAGELGGQFHHKSDNGSVGAVFGAKRQ

SEQ ID NO: 112 - protein, 540 aa, Actinobacillus pleuropneumoniae
MHFKLNPYALAFTSLFLVACSGGKGSFDLEDVRPNKTTGVSKEEYKDVETAKKEKEQLGELMEPALGYVVKVPVSSFENKKVDISDIEVITNGNLDDVPYKANSSKYNYPDIKTKDSSLQYVRSGYVIDGEHSGSNEKGYVYYKGNSPAKELPVNQLLTYTGSWDFTSNANLNNEEGRPNYLNDDYYTKFIGKRVGLVSGDAKPAKHKYTSQFEVDFATKKMTGKLSDKEKTIYTVNADIRGNRFTGAATASDKNKGKGESYNFFSADSQSLEGGFYGPKAEEMAGKFVANDKSLFAVFSAKHNGSNVNTVRIIDASKIDLTNFSISELNNFGDASVLIIDGKKIKLAGSGFTNKHTIEINGKTMVAVACCSNLEYMKFGQLWQQAEGGKPENNSLFLQGERTATDKMPKGGNYKYIGTWDAQVSKENNWVATADDDRKAGYRTEFDVDFGNKNLSGKLFDKNGVNPVFTVDAKIDGNGFTGKAKTSDDGFALDSGSSRYENVKFNDVAVSGGFYGPTAAELGGQFHHKSENGSVGAVFG

SEQ ID NO: 113 - protein, 590 aa, Actinobacillus pleuropneumoniae
MHFKLNPYALAFTSLFLVACSGGKGSFDLEDVRPNQTAKAEKATTSYQDEETKKKTKEELDKLMEPALGYETQILRRNKAPKTETGEKRNERVVELSEDKITKLYQESVEIIPHLDELNGKTTSNDVYHSHDSKRLDKNRDLKYVRSGYVYDGSFNEIRRNDSGFHVFKQGIDGYVYYLGVTPSKELPKGKVISYKGTWDFVSNINLDREIDGFDTSGDGKNVSATSITETVNRDHKVGEKLGDNEVKGVAHSSEFAVDFDNKKLTGSLYRNGYINRNKAQEVTKRYSIEADIAGNRFRGKAKAEKAGDPIFTDSNYLEGGFYGPKAEEMAGKFFTNNKSLFAVFAAKSENGETTTERIIDATKIDLTQFNAKELNNFGDASVLIIDGQKIDLAGVNFKNSKTVEINGKTMVAVACCSNLEYMKFGQLWQKEGKQQVKDNSLFLQGERTATDKMPAGGNYKYVGTWDALVSKGTNWIAEADNNRESGYRTEFDVNFSDKKVNGKLFDKGGVNPVFTVDATINGNGFIGSAKTSDSGFALDAGSSQHGNAVFSDIKVNGGFYGPTAGELGGQFHHKSDNGSVGAVFGAKRQ

SEQ ID NO: 114 - protein, 540 aa, Actinobacillus pleuropneumoniae; identical to SEQ ID NO: 2

SEQ ID NO: 115 - protein, 545 aa, Haemophilus parasuis
MHFKLNPYALAFTSLFLVACSGGKGSFDLEDVQPNKTTGVSKEEYQDVETDKKVKEQLGELMEPALGYVVKVPVSQSGARRTEISNPEAITDEDLKKIPNHETIKSVAEQNYGWVVDKTADKTMKYVRSGYAIDVDHYGTRDKGYVFYKGINPSKELPQGLVLTYQGEWDFTSDANLDAKRPNSNPEFNGYGPGQRIATTSANAKGRTYTSEFEVDFSAKKLKGKLNSKTANTESLERYSIEAEPKGNRFRGKAIAKDTSDAILGKSSDYLEGGFYGPKAEELAGKFITNDKSLFAVFSAKHNGSNVDTVRIIDASKIDLTHFNSSELTNFGDASVLIIDGKKMDLAGTDFKNSKTIEINGKTMVAVACCSNLEYMKFGQLWQKEGETAKDNSLFLQGERTTTDKMPKGGNYKYIGTWDAQVSKENNWVATADDDRKAGYRTEFDVDFGNKNLSGKLFDKNGVNPVFTVDAKINGNGFTGKAKTSDAGFALDSDSSRYDNVKFSDVAVNGGFYGPTAAELGGQFFHKSDNGSVGAIFGAKRQVKK

SEQ ID NO: 116 - DNA, 1740 bp, Neisseria meningitidis
tgtctgggtggcggcggcagtttcgatttggacagcgtggaaaccgtgcaagatatgcactccaaacctaagtatgaggatgaaaaaagccagcctgaaagccaacaggatgtatcggaaaacagcggcgcggcttatggctttgcagtaaaactacctcgccggaatgcacattttaatcctaaatataaggaaaagcacaaaccattgggttcaatggattggaaaaaactgcaaagaggagaaccaaatagttttagtgagagggatgaattggaaaaaaaacggggtagttctgaacttattgaatcaaaatgggaagatgggcaaagtcgtgtagttggttatacaaatttcacttatgtccgttcgggatatgtttaccttaataaaaataatattgatattaagaataatatagttctttttggacctgacggatatctttactataaagggaaagaaccttccaaggagctgccatcggaaaagataacttataaaggtacttgggattatgttactgatgctatggaaaaacaaaggtttgaaggattgggtagtgcagcaggaggagataaatcgggggcgttgtctgcattagaagaaggggtattgcgtaatcaggcagaggcatcatccggtcataccgattttggtatgactagtgagtttgaggttgatttttctgataaaacaataaagggcacactttatcgtaacaaccgtattactcaaaataatagtgaaaacaaacaaataaaaactacgcgttacaccattcaagcaactcttcacggcaaccgtttcaaaggtaaggcgttggcggcagataaaggtgcaacaaatggaagtcatccctttatttccgactccgacagtttggaaggcggattttacgggccgaaaggcgaggaacttgccggtaaattcttgagcaacgacaacaaagttgcagcggtgtttggtgcgaagcagaaagataagaaggatggggaaaacgcggcagggcctgcaacggaaaccgtgatagatgcataccgtattaccggcgaggagtttaagaaagagcaaatagacagttttggagatgtgaaaaagctgctggttgacggagtggagctttcactgctgccgtctgagggcaataaggcggcatttcagcacgagattgagcaaaacggcgtgaaggcaacggtgtgttgttccaacttggattacatgagttttgggaagctgtcaaaagaaaataaagacgatatgttcctgcaaggtgtccgcactccagtatccgatgtggcggcaaggacggaggcaaacgccaaatatcgcggtacttggtacggatatattgccaacggcacaagctggagcggcgaagcctccaatcaggaaggtggtaatagggcagagtttgacgtggatttttccactaaaaaaatcagtggcacactgacggcaaaagaccgtacgtctcctgcgtttactattactgccatgattaaggacaacggtttttcaggtgtggcgaaaaccggtgaaaacggctttgcgctggatccgcaaaataccggaaattcccactatacgcatattgaagccactgtatccggcggtttctacggcaaaaacgccatcgagatgggcggatcgttctcatttccgggaaatgcaccagagggaaaacaagaaaaagcatcggtggtattcggtgcgaaacgccaacagcttgtgcaataa

SEQ ID NO: 117 - protein, 579 aa, Neisseria meningitidis
CLGGGGSFDLDSVETVQDMHSKPKYEDEKSQPESQQDVSENSGAAYGFAVKLPRRNAHFNPKYKEKHKPLGSMDWKKLQRGEPNSFSERDELEKKRGSSELIESKWEDGQSRVVGYTNFTYVRSGYVYLNKNNIDIKNNIVLFGPDGYLYYKGKEPSKELPSEKITYKGTWDYVTDAMEKQRFEGLGSAAGGDKSGALSALEEGVLRNQAEASSGHTDFGMTSEFEVDFSDKTIKGTLYRNNRITQNNSENKQIKTTRYTIQATLHGNRFKGKALAADKGATNGSHPFISDSDSLEGGFYGPKGEELAGKFLSNDNKVAAVFGAKQKDKKDGENAAGPATETVIDAYRITGEEFKKEQIDSFGDVKKLLVDGVELSLLPSEGNKAAFQHEIEQNGVKATVCCSNLDYMSFGKLSKENKDDMFLQGVRTPVSDVAARTEANAKYRGTWYGYIANGTSWSGEASNQEGGNRAEFDVDFSTKKISGTLTAKDRTSPAFTITAMIKDNGFSGVAKTGENGFALDPQNTGNSHYTHIEATVSGGFYGKNAIEMGGSFSFPGNAPEGKQEKASVVFGAKRQQLVQ

SEQ ID NO: 118 - DNA, 762 bp, Neisseria meningitidis
cagaaagataagaaggatggggaaaacgcggcagggcctgcaacggaaaccgtgatagatgcataccgtattaccggcgaggagtttaagaaagagcaaatagacagttttggagatgtgaaaaagctgctggttgacggagtggagctttcactgctgccgtctgagggcaataaggcggcatttcagcacgagattgagcaaaacggcgtgaaggcaacggtgtgttgttccaacttggattacatgagttttgggaagctgtcaaaagaaaataaagacgatatgttcctgcaaggtgtccgcactccagtatccgatgtggcggcaaggacggaggcaaacgccaaatatcgcggtacttggtacggatatattgccaacggcacaagctggagcggcgaagcctccaatcaggaaggtggtaatagggcagagtttgacgtggatttttccactaaaaaaatcagtggcacactgacggcaaaagaccgtacgtctcctgcgtttactattactgccatgattaaggacaacggtttttcaggtgtggcgaaaaccggtgaaaacggctttgcgctggatccgcaaaataccggaaattcccactatacgcatattgaagccactgtatccggcggtttctacggcaaaaacgccatcgagatgggcggatcgttctcatttccgggaaatgcaccagagggaaaacaagaaaaagcatcggtggtattcggtgcgaaacgccaacagcttgtgcaa

SEQ ID NO: 119 - protein, 254 aa, Neisseria meningitidis
QKDKKDGENAAGPATETVIDAYRITGEEFKKEQIDSFGDVKKLLVDGVELSLLPSEGNKAAFQHEIEQNGVKATVCCSNLDYMSFGKLSKENKDDMFLQGVRTPVSDVAARTEANAKYRGTWYGYIANGTSWSGEASNQEGGNRAEFDVDFSTKKISGTLTAKDRTSPAFTITAMIKDNGFSGVAKTGENGFALDPQNTGNSHYTHIEATVSGGFYGKNAIEMGGSFSFPGNAPEGKQEKASVVFGAKRQQLVQ

SEQ ID NO: 120 - DNA, 970 bp, Neisseria meningitidis
tgtctgggtggcggcggcagtttcgatttggacagcgtggaaaccgtgcaagatatgcactccaaacctaagtatgaggatgaaaaaagccagcctgaaagccaacaggatgtatcggaaaacagcggcgcggcttatggctttgcagtaaaactacctcgccggaatgcacattttaatcctaaatataaggaaaagcacaaaccattgggttcaatggattggaaaaaactgcaaagaggagaaccaaatagttttagtgagagggatgaattggaaaaaaaacggggtagttctgaacttattgaatcaaaatgggaagatgggcaaagtcgtgtagttggttatacaaatttcacttatgtccgttcgggatatgtttaccttaataaaaataatattgatattaagaataatatagttctttttggacctgacggatatctttactataaagggaaagaaccttccaaggagctgccatcggaaaagataacttataaaggtacttgggattatgttactgatgctatggaaaaacaaaggtttgaaggattgggtagtgcagcaggaggagataaatcgggggcgttgtctgcattagaagaaggggtattgcgtaatcaggcagaggcatcatccggtcataccgattttggtatgactagtgagtttgaggttgatttttctgataaaacaataaagggcacactttatcgtaacaaccgtattactcaaaataatagtgaaaacaaacaaataaaaactacgcgttacaccattcaagcaactcttcacggcaaccgtttcaaaggtaaggcgttggcggcagataaaggtgcaacaaatggaagtcatccctttatttccgactccgacagtttggaaggcggattttacgggccgaaaggcgaggaacttgccggtaaattcttgagcaacgacaacaaagttgcagcggtgtttggtg

SEQ ID NO: 121 - protein, 320 aa, Neisseria meningitidis
CLGGGGSFDLDSVETVQDMHSKPKYEDEKSQPESQQDVSENSGAAYGFAVKLPRRNAHFNPKYKEKHKPLGSMDWKKLQRGEPNSFSERDELEKKRGSSELIESKWEDGQSRVVGYTNFTYVRSGYVYLNKNNIDIKNNIVLFGPDGYLYYKGKEPSKELPSEKITYKGTWDYVTDAMEKQRFEGLGSAAGGDKSGALSALEEGVLRNQAEASSGHTDFGMTSEFEVDFSDKTIKGTLYRNNRITQNNSENKQIKTTRYTIQATLHGNRFKGKALAADKGATNGSHPFISDSDSLEGGFYGPKGEELAGKFLSNDNKVAA

SEQ ID NO: 122 - DNA, 2060 bp, Neisseria meningitidis
tgtctgggcggcggcggcagtttcgatcttgattctgtcgataccgaagccccgcgtcccgcgccaaagtatcaagatgtttcttccgaaaaaccgcaagcccaaaaagaccaaggcggatacggttttgcgatgaggttgaaacggaggaattggtatccgggggcagaagaaagcgaggttaaactgaacgagagtgattgggaggcgacgggattgccgacaaaacccaaggaacttcctaaacggcaaaaatcggttattgaaaaagtagaaacagacggcgacagcgatatttattcttccccctatctcacaccatcaaaccatcaaaacggcagcgctggcaacggtgtaaatcaacctaaaaatcaggcaacaggtcacgaaaatttccaatatgtttattccggttggttttataaacatgcagcgagtgaaaaagatttcagtaacaaaaaaattaagtcaggcgacgatggttatatcttctatcacggtgaaaaaccttcccgacaacttcctgcttctggaaaagttatctacaaaggtgtgtggcattttgtaaccgatacaaaaaagggtcaagattttcgtgaaattatccagccttcaaaaaaacaaggcgacaggtatagcggattttctggtgatggcagcgaagaatattccaacaaaaacgaatccacgctgaaagatgatcacgagggttatggttttacctcgaatttagaagtggatttcggcaataagaaattgacgggtaaattaatacgcaataatgcgagcctaaataataatactaataatgacaaacataccacccaatactacagccttgatgcacaaataacaggcaaccgcttcaacggcacggcaacggcaactgacaaaaaggagaatgaaaccaaactacatccctttgtttccgactcgtcttctttgagcggcggctttttcggcccgcagggtgaggaattgggtttccgctttttgagcgacgatcaaaaagttgccgttgtcggcagcgcgaaaaccaaagacaaactggaaaatggcgcggcggcttcaggcagcacaggtgcggcagcatcgggcggtgcggcaggcacgtcgtctgaaaacagtaagctgaccacggttttggatgcggttgaattgacactaaacgacaagaaaatcaaaaatctcgacaacttcagcaatgccgcccaactggttgtcgacggcattatgattccgctcctgcccaaggattccgaaagcgggaacactcaggcagataaaggtaaaaacggcggaacagaatttacccgcaaatttgaacacacgccggaaagtgataaaaaagacgcccaagcaggtacgcagacgaatggggcgcaaaccgcttcaaatacggcaggtgataccaatggcaaaacaaaaacctatgaagtcgaagtctgctgttccaacctcaattatctgaaatacggaatgttgacgcgcaaaaacagcaagtccgcgatgcaggcaggaggaaacagtagtcaagctgatgctaaaacggaacaagttgaacaaagtatgttcctccaaggcgagcgtaccgatgaaaaagagattccaaccgaccaaaacgtcgtttatcgggggtcttggtacgggcatattgccaacggcacaagctggagcggcaatgcttctgataaagagggcggcaacagggcggaatttactgtgaattttgccgataaaaaaattaccggcaagttaaccgctgaaaacaggcaggcgcaaacctttaccattgagggaatgattcagggcaacggctttgaaggtacggcgaaaactgctgagtcaggttttgatctcgatcaaaaaaataccacccgcacgcctaaggcatatatcacagatgccaaggtaaagggcggtttttacgggcctaaagccgaagagttgggcggatggtttgcctatccgggcgataaacaaacggaaaaggcaacagctacatccagcgatggaaattcagcaagcagcgcgaccgtggtattcggtgcgaaacgcca

SEQ ID NO: 123 - protein, 680 aa, Neisseria meningitidis
CLGGGGSFDLDSVDTEAPRPAPKYQDVSSEKPQAQKDQGGYGFAMRLKRRNWYPGAEESEVKLNESDWEATGLPTKPKELPKRQKSVIEKVETDGDSDIYSSPYLTPSNHQNGSAGNGVNQPKNQATGHENFQYVYSGWFYKHAASEKDFSNKKIKSGDDGYIFYHGEKPSRQLPASGKVIYKGVWHFVTDTKKGQDFREIIQPSKKQGDRYSGFSGDGSEEYSNKNESTLKDDHEGYGFTSNLEVDFGNKKLTGKLIRNNASLNNNTNNDKHTTQYYSLDAQITGNRFNGTATATDKKENETKLHPFVSDSSSLSGGFFGPQGEELGFRFLSDDQKVAVVGSAKTKDKLENGAAASGSTGAAASGGAAGTSSENSKLTTVLDAVELTLNDKKIKNLDNFSNAAQLVVDGIMIPLLPKDSESGNTQADKGKNGGTEFTRKFEHTPESDKKDAQAGTQTNGAQTASNTAGDTNGKTKTYEVEVCCSNLNYLKYGMLTRKNSKSAMQAGGNSSQADAKTEQVEQSMFLQGERTDEKEIPTDQNVVYRGSWYGHIANGTSWSGNASDKEGGNRAEFTVNFADKKITGKLTAENRQAQTFTIEGMIQGNGFEGTAKTAESGFDLDQKNTTRTPKAYITDAKVKGGFYGPKAEELGGWFAYPGDKQTEKATATSSDGNSASSATV

SEQ ID NO: 124 - DNA, 1030 bp, Neisseria meningitidis
accaaagacaaactggaaaatggcgcggcggcttcaggcagcacaggtgcggcagcatcgggcggtgcggcaggcacgtcgtctgaaaacagtaagctgaccacggttttggatgcggttgaattgacactaaacgacaagaaaatcaaaaatctcgacaacttcagcaatgccgcccaactggttgtcgacggcattatgattccgctcctgcccaaggattccgaaagcgggaacactcaggcagataaaggtaaaaacggcggaacagaatttacccgcaaatttgaacacacgccggaaagtgataaaaaagacgcccaagcaggtacgcagacgaatggggcgcaaaccgcttcaaatacggcaggtgataccaatggcaaaacaaaaacctatgaagtcgaagtctgctgttccaacctcaattatctgaaatacggaatgttgacgcgcaaaaacagcaagtccgcgatgcaggcaggaggaaacagtagtcaagctgatgctaaaacggaacaagttgaacaaagtatgttcctccaaggcgagcgtaccgatgaaaaagagattccaaccgaccaaaacgtcgtttatcgggggtcttggtacgggcatattgccaacggcacaagctggagcggcaatgcttctgataaagagggcggcaacagggcggaatttactgtgaattttgccgataaaaaaattaccggcaagttaaccgctgaaaacaggcaggcgcaaacctttaccattgagggaatgattcagggcaacggctttgaaggtacggcgaaaactgctgagtcaggttttgatctcgatcaaaaaaataccacccgcacgcctaaggcatatatcacagatgccaaggtaaagggcggtttttacgggcctaaagccgaagagttgggcggatggtttgcctatccgggcgataaacaaacggaaaaggcaacagctacatccagcgatggaaattcagcaagcagcgcgaccgtggtattcggtgcgaaacgccaacagc

SEQ ID NO: 125 - protein, 343 aa, Neisseria meningitidis
TKDKLENGAAASGSTGAAASGGAAGTSSENSKLTTVLDAVELTLNDKKIKNLDNFSNAAQLVVDGIMIPLLPKDSESGNTQADKGKNGGTEFTRKFEHTPESDKKDAQAGTQTNGAQTASNTAGDTNGKTKTYEVEVCCSNLNYLKYGMLTRKNSKSAMQAGGNSSQADAKTEQVEQSMFLQGERTDEKEIPTDQNVVYRGSWYGHIANGTSWSGNASDKEGGNRAEFTVNFADKKITGKLTAENRQAQTFTIEGMIQGNGFEGTAKTAESGFDLDQKNTTRTPKAYITDAKVKGGFYGPKAEELGGWFAYPGDKQTEKATATSSDGNSASSATVVFGAKRQQ

SEQ ID NO: 126 - DNA, 1030 bp, Neisseria meningitidis
tgtctgggcggcggcggcagtttcgatcttgattctgtcgataccgaagccccgcgtcccgcgccaaagtatcaagatgtttcttccgaaaaaccgcaagcccaaaaagaccaaggcggatacggttttgcgatgaggttgaaacggaggaattggtatccgggggcagaagaaagcgaggttaaactgaacgagagtgattgggaggcgacgggattgccgacaaaacccaaggaacttcctaaacggcaaaaatcggttattgaaaaagtagaaacagacggcgacagcgatatttattcttccccctatctcacaccatcaaaccatcaaaacggcagcgctggcaacggtgtaaatcaacctaaaaatcaggcaacaggtcacgaaaatttccaatatgtttattccggttggttttataaacatgcagcgagtgaaaaagatttcagtaacaaaaaaattaagtcaggcgacgatggttatatcttctatcacggtgaaaaaccttcccgacaacttcctgcttctggaaaagttatctacaaaggtgtgtggcattttgtaaccgatacaaaaaagggtcaagattttcgtgaaattatccagccttcaaaaaaacaaggcgacaggtatagcggattttctggtgatggcagcgaagaatattccaacaaaaacgaatccacgctgaaagatgatcacgagggttatggttttacctcgaatttagaagtggatttcggcaataagaaattgacgggtaaattaatacgcaataatgcgagcctaaataataatactaataatgacaaacataccacccaatactacagccttgatgcacaaataacaggcaaccgcttcaacggcacggcaacggcaactgacaaaaaggagaatgaaaccaaactacatccctttgtttccgactcgtcttctttgagcggcggctttttcggcccgcagggtgaggaattgggtttccgctttttgagcgacgatcaaaaagttgccgttgtcggcagcg

SEQ ID NO: 127 - protein, 340 aa, Neisseria meningitidis
CLGGGGSFDLDSVDTEAPRPAPKYQDVSSEKPQAQKDQGGYGFAMRLKRRNWYPGAEESEVKLNESDWEATGLPTKPKELPKRQKSVIEKVETDGDSDIYSSPYLTPSNHQNGSAGNGVNQPKNQATGHENFQYVYSGWFYKHAASEKDFSNKKIKSGDDGYIFYHGEKPSRQLPASGKVIYKGVWHFVTDTKKGQDFREIIQPSKKQGDRYSGFSGDGSEEYSNKNESTLKDDHEGYGFTSNLEVDFGNKKLTGKLIRNNASLNNNTNNDKHTTQYYSLDAQITGNRFNGTATATDKKENETKLHPFVSDSSSLSGGFFGPQGEELGFRFLSDDQKVAV

SEQ ID NO: 128 - DNA, 735 bp, Neisseria meningitidis
ggatcctcgtctgaaaacagtaagctgaccacggttttggatgcggttgaattgacactaaacgacaagaaaatcaaaaatctcgacaacttcagcaatgccgcccaactggttgtcgacggcattatgattgatctggccggaacagaatttacccgcaaatttgaacacacgattaacggcaaaacctatgaagtcgaagtctgctgttccaacctcaattatctgaaatacggaatgttgacgcgcaaaggcaaacaggttgaacaaagtatgttcctccaaggcgagcgtaccgatgaaaaagagattccaaccgaccaaaacgtcgtttatcgggggtcttggtacgggcatattgccaacggcacaagctggagcggcaatgcttctgataaagagggcggcaacagggcggaatttactgtgaattttgccgataaaaaaattaccggcaagttaaccgctgaaaacaggcaggcgcaaacctttaccattgagggaatgattcagggcaacggctttgaaggtacggcgaaaactgctgagtcaggttttgatctcgatcaaaaaaataccacccgcacgcctaaggcatatatcacagatgccaaggtaaagggcggtttttacgggcctaaagccgaagagttgggcggatggtttgcctatcataaaagcgataacggcagcgcgaccgtggtattcggtgcgaaacgccaacagcctgtgcaa

SEQ ID NO: 129 - protein, 245 aa, Neisseria meningitidis
GSSSENSKLTTVLDAVELTLNDKKIKNLDNFSNAAQLVVDGIMIDLAGTEFTRKFEHTINGKTYEVEVCCSNLNYLKYGMLTRKGKQVEQSMFLQGERTDEKEIPTDQNVVYRGSWYGHIANGTSWSGNASDKEGGNRAEFTVNFADKKITGKLTAENRQAQTFTIEGMIQGNGFEGTAKTAESGFDLDQKNTTRTPKAYITDAKVKGGFYGPKAEELGGWFAYHKSDNGSATVVFGAKRQQPVQ

SEQ ID NO: 130 - DNA, 945 bp, Neisseria meningitidis
ggatcctcgtctgaaaacagtaagctgaccacggttttggatgcggttgaattgacactaaacgacaagaaaatcaaaaatctcgacaacttcagcaatgccgcccaactggttgtcgacggcattatgattccactcctcccagccacaaaagccgtctttgatgagaaccgcaaatacggcccggaatttacccgcaaatttgaacacacggccaaggaaatcacagagttgttgggcagccgggctttgctcaacggcaacagccgcaatacaaaagccaccgcgcgccgtacccgcacctatgaagtcgaagtctgctgttccaacctcaattatctgaaatacggaatgttgacgcgcaaagttacttgggaaaatgtgcggcaaactgccggcggcgcagtcaaccaacacaaaaatgtcggcgtttacaaccgatatgccgttgaacaaagtatgttcctccaaggcgagcgtaccgatgaaaaagagattccaaccgaccaaaacgtcgtttatcgggggtcttggtacgggcatattgccaacggcacaagctggagcggcaatgcttctgataaagagggcggcaacagggcggaatttactgtgaattttgccgataaaaaaattaccggcaagttaaccgctgaaaacaggcaggcgcaaacctttaccattgagggaatgattcagggcaacggctttgaaggtacggcgaaaactgctgagtcaggttttgatctcgatcaaaaaaataccacccgcacgcctaaggcatatatcacagatgccaaggtaaagggcggtttttacgggcctaaagccgaagagttgggcggatggtttgcctataccgcgcaggcggcattgggcgggacgaggacggcgggcagcagcgcgaccgtggtattcggtgcgaaacgccaacagcctgtgcaa

SEQ ID NO: 131 - protein, 315 aa, Neisseria meningitidis
GSSSENSKLTTVLDAVELTLNDKKIKNLDNFSNAAQLVVDGIMIPLLPATKAVFDENRKYGPEFTRKFEHTAKEITELLGSRALLNGNSRNTKATARRTRTYEVEVCCSNLNYLKYGMLTRKVTWENVRQTAGGAVNQHKNVGVYNRYAVEQSMFLQGERTDEKEIPTDQNVVYRGSWYGHIANGTSWSGNASDKEGGNRAEFTVNFADKKITGKLTAENRQAQTFTIEGMIQGNGFEGTAKTAESGFDLDQKNTTRTPKAYITDAKVKGGFYGPKAEELGGWFAYTAQAALGGTRTAGSSATVVFGAKRQQPVQ

SEQ ID NO: 132 - protein, 670 aa, Neisseria meningitidis
CLGGGGSFDLDSVDTEAPRPAPKYQDVSSEKPQAQKDQGGYGFAMRFKRRNWHPRVNPKEDKIELSENDWEQTDNGNIKTPSKQKNIINALLGSEGALLQDSSQEGQSISKVTDHHNFQYVWSGFFYKHIQTKFETTGGKMTARSGPDGYIFYKGKDPSRKLPVSGEVMYKGTWDFLTDVKANQKFTDLGNASTKPGDRYSAFSGELDYIVKQENDKKDGHVGLGLTTEITVDFEKKTLSGKLIKNNSVITTNNDKHTTQYYSLEATLKGNRFNGKATATDKPKENEIKQHPFVSDSSSLSGGFFGPQGEELGFRFLSDDKKVAVVGSAKTKDKAESGNGNGNGTSGGASVSASNGAAGTSSENSKLTTVLDAVELKSGDKEVKKLDNFSNAAQLVVDGIMIPLLPEASESGSNQANQGTNGGTAFTRKFNHTPKSDEKDTQAGTAENGNPAASNTAGDANGKTKTYEVEVCCSNLNYLKYGMLTRKNSKSAMQAGESSSQADAKTEQVEQSMFLQGERTDEKEIPNDQNVVYRGSWYGHIANGTSWSGNASDKEGGNRADFTVNFGTKKINGTLTADNRQAATFTIVGDIEGNGFSGTAKTADSGFDLDQSNNTRTPKAYITNAKVQGGFYGPKAEELGGWFAYSDDKQTKNATDASGNGNSASSATVV

SEQ ID NO: 133 - protein, 660 aa, Neisseria meningitidis
CLGGGGSFDLDSVDTEAPRPAPKYQDVSSEKPQAQKDQGGYGFAMRFKRRNWYQRANPKEDEIKLSEDDWEQTDDGDIKNPSKQKNIINALPGNNEGALLQDSSQENQGISKVKDYHNFQYVWSGFFYKQIKNTIEKNGSSITAARNGPDGYIFYKGKDPSRKLPVSGEVMYKGTWDFLTDVKANQKFTDLGNASTKPGDRYSAFSGELDYIVKQENDKKDGHVGLGLTTEITVDFEKKTLSGKLIKNNSVITTNNDKHTTQYYSLEATLKGNRFNGKATATDKPKENETKQHPFVSDSSSLSGGFFGPQGEELGFRFLSDDKKVAVVGSAKTKDKPGNGAAAPGGTDAAASNGAAGTSSENSKLTTVLDAVELKSGGKEVKNLDNFSNAAQLVVDGIMIPLLPKDSESGNTQADKGKNGGTEFTRKFEHTPESDKKDAQAGTAENGNPAASNTAGDTNGKTKTYAVEVCCSNLNYLKYGLLTRKTAGNTGEGGNGAAQTDAQSMFLQGERTDEKEIPNDQNIVYRGSWYGHIANGTSWSGNASDKEGGNRAEFTVNFADKKLNGTLTAGERTSPTFTITATIQGNGFEGTAKTGDDGFALDTKNTVDTHKAHITDANVQGGFYGPKAEELGGWFAYPGDRQAQPSASGSGTSAANSATV

SEQ ID NO: 134 - protein, 640 aa, Neisseria meningitidis
PAPKYQDVSSEKPQAQKDQGGYGFAMRLKRRNWHTQANPKEDEIKLSENDWEATGLPGNPKNLPERQKSVIEKVETDDGSNIYSSPYLTQSNHPNGNTGNGTNLPKNEVTDYKDFKYVYSGWFYKHAKRNFDITNKIVRQGDDGYIFYHGKEPSRQLPVSEKITYKGVWHFVTDTKNGQKFYDIIQPSKKQGDRYSGFSGDDDEQYSNKNDMLKGDHEGYGFTSNLEVDFDDKKLTGKLIRNDKVTNATTGNKHTTQYYSLEAQVTGNRFNGKAIATDKPQENGTKQHPFVSDSSSLSGGFFGPQGEELGFRFLSDDQKVAVVGSAKTKDKPANGNTAAASGGTDAAASGGTAGTPSESTKLTTVLDAVELKSGDKEVKKLDNFSNAAQLVVDGIMIPLLPEASESGNNQANQGTNGGTAFTRKFNHTPKSDEKDTQAGTAENGNPAASNTAGDANGKTKTYEVEVCCSNLNYLKYGLLTRKTAGNTGEGGNGSPTAAQTDAQSMFLQGERTDEKEIPKEQQDIVYRGSWYGHIANGTSWSGNASDKEGGNRAEFTVNFGDKKITGTLTADNRQAATFTIEGDIEGNGFSGTAKTDNLGFDLDQSDNTRTPKAYITDAKVQGGFYGPKAEELGGWFAYPG

SEQ ID NO: 135 - protein, 700 aa, Neisseria meningitidis
CLGGGGSFDLDSVDTEAPRPAPKYQDVSSEKPQAQKDQGGYGFAMRLKRRNWHPQANPKEDEIKLSENDWEATGLPGNPKNLPERQKSVIEKVKTGSDSNIYSSPYLTQSNHQNGSANQPKNEVKDYKEFKYVYSGWFYKHAKLEIIKENNLIKGAKSGDDGYIFYHGEKPSRQLPVSGEVTYKGVWHFVTDTKQGQKFNDILGTSKKQGDRYSGFPGDDGEEYSNKNEATLQGSQEGYGFTSNLKVDFNKKKLTGELIRNNRVTNATANDKYTTQYYSLEAQVTGNRFNGKATATDKPGTGETKQHPFVSDSSSLSGGFFGPKGEELGFRFLSNDQKVAVVGSAKTQDKAANGNTAAASGGTDAAASNGAAGTSSENSKLTTVLDAVELTLNDKKIKNLDNFSNAAQLVVDGIMIPLLPETSESGSNQADKGKKGKNGKNGGTDFTYKTTYTPKNDDKDTKAQTGAAGSSGAQTDLGKADVNGGKAETKTYEVEVCCSNLNYLKYGMLTRKNSKSAMQAGGNSSQADAKTEQVEQSMFLQGERTDEKEIPNDQNVVYRGSWYGHIASSTSWSGNASNATSGNRAEFTVNFDTKKINGTLTAENRQEATFTIDGKIEGNGFSGTAKTADLGFDLDQSNTTGTPKAYITDAKVQGGFYGPKAEELGGWFAYPGDKQTEKATVASGDGNSASSATVVFGAKR

SEQ ID NO: 136 - protein, 680 aa, Neisseria meningitidis
CLGGGGSFDLDSVDTEAPRPAPKYQDVFSEKPQAQKDQGGYGFAMRLKRRNWYPQAKEDEVKLDESDWEATGLPDEPKELPKRQKSVIEKVETDSDNNIYSSPYLKPSNHQNGNTGNGINQPKNQAKDYENFKYVYSGWFYKHAKREFNLKVEPKSAKNGDDGYIFYHGKEPSRQLPASGKITYKGVWHFATDTKKGQKFREIIQPSKSQGDRYSGFSGDDGEEYSNKNKSTLTDGQEGYGFTSNLEVDFHNKKLTGKLIRNNANTDNNQATTTQYYSLEAQVTGNRFNGKATATDKPQQNSETKEHPFVSDSSSLSGGFFGPQGEELGFRFLSDDQKVAVVGSAKTKDKPANGNTAAASGGTDAAASNGAAGTSSENGKLTTVLDAVELKLGDKEVQKLDNFSNAAQLVVDGIMIPLLPEASESGNNQANQGTNGGTAFTRKFDHTPESDKKDAQAGTQTNGAQTASNTAGDTNGKTKTYEVEVCCSNLNYLKYGMLTRKNSKSAMQAGESSSQADAKTEQVEQSMFLQGERTDEKEIPSEQNIVYRGSWYGYIANDKSTSWSGNASNATSGNRAEFTVNFADKKITGTLTADNRQEATFTIDGNIKDNGFEGTAKTAESGFDLDQSNTTRTPKAYITDAKVQGGFYGPKAEELGGWFAYPGDKQTKNATNASGNSSAT

SEQ ID NO: 137 - protein, 680 aa, Neisseria meningitidis
CLGGGGSFDLDSVDTEAPRPAPKYQDVSSEKPQAQKDQGGYGFAMRLKRRNWYPQAKEDEVKLDESDWEATGLPDEPKELPKRQKSVIEKVETDSDNNIYSSPYLKPSNHQNGNTGNGINQPKNQAKDYENFKYVYSGWFYKHAKREFNLKVEPKSAKNGDDGYIFYHGKEPSRQLPASGKITYKGVWHFATDTKKGQKFREIIQPSKSQGDRYSGFSGDDGEEYSNKNKSTLTDGQEGYGFTSNLEVDFHNKKLTGKLIRNNANTDNNQATTTQYYSLEAQVTGNRFNGKATATDKPQNSETKEHPFVSDSSSLSGGFFGPQGEELGFRFLSDDQKVAVVGSAKTKDKPANGNTAAASGGTDAAASNGAAGTSSENGKLTTVLDAVELKLGDKEVQKLDNFSNAAQLVVDGIMIPLLPEASESGNNQANQGTNGGTAFTRKFDHTPESDKKDAQAGTQTNGAQTASNTAGDTNGKTKTYEVEVCCSNLNYLKYGMLTRKNSKSAMQAGESSSQADAKTEQVEQSMFLQGERTDEKEIPSEQNVVYRGSWYGHIANGTSWSGNASDKEGGNRAEFTVDFGAKKINGKLTAENRQAATFTIEGDIEGNGFSGTAKTAESGFDLDQSNTTRTPKAYITDAKVQGGFYGPKAEELGGWFAYPGDKQTKNATNASGNSSATVVF

SEQ ID NO: 138 - protein, 690 aa, Neisseria meningitidis
CLGGGGSFDLDSVDTEAPRPAPKYQDVSSETPKAQKDQGGYGFAMRFKRLNRHPKAMPQENEVKLKNDDWEVTGLPTEPKKLPLKQESVILQVQASNGDNNIYTSPYLTQSSHNSHNGSVNGGANQPKNEATGYKNFEYVYSGWFYKHAANETDFSKNKFKSGDDGYIFYHGKKPSRQLPASGKVTYKGVWHFVTDTKKGQKFHDILEASKGQGDRYSGFSGDEGETISNRTDSELKTDQEGYGFTSNLEVDFDNKKLTGKLIRNDKVTNATTGDKHTTQYYSLEAQVTGNRFSGKAEATDKPEQDGTKQHPFVSDSSSLSGGFFGPQGEELGFRFLSNDQKVAVVGSAKTKDKAESGKTVAASGGTGAAASGGAADMPSENGKLTTVLDAVELTLNDKKIKNLDNFSNAAQLVVDGIMIPLLPKDSESGNNQANQGTNGGTAFTYKTTYTPKSDEKDTQAGTAANGNQAASNTAGDTNGKTKTYEVEVCCSNLNYLKYGMLTRKNSKSAMQAGENGSQADAKTEQVEQSMFLQGERTDEKEIPKEQQDIVYRGSWYGHIAGSTSWSGNASNATSGNRAEFTVNFDTKKINGKLTAENRQAATFTIVGDIKDNGFEGTAKTDNLGFDLDQSNTTGTPKAYITNAKVQGGFYGPKAEELGGWFAYSDDKQTKNATDASGNGNSASSATVVF

SEQ ID NO: 139 - protein, 680 aa, Neisseria meningitidis
CLGGGGSFDLDSVDTEAPRPAPKYQDVSSEKPQAQKDQGGYGFAMRLKRRNRHPQAKEDKVELNPNDWEETGLPSKPQNLPERQQSVIDKVKTDDGSNIYTSPYLTQSNHQNGSTNSGANQPKNEVKDYKNFKYVYSGWFYKHAESEREFSKIKFKSGDDGYIFYHGKDPSRQLPTSEKVIYKGVWHFVTDTEKGQKFNDILETSKGQGDRYSGFSGDDGETTSNRTDSNLNDKHEGYGFTSNLEVDFGSKKLTGKLIRNNRVTNATTNDKYTTQYYSLDAQITGNRFNGKAIATDKPDTGGTKLHPFVSDSSSLSGSFFGPKGEELGFRFLSDDKKVAVVGSAKTKDKNANGNTPAASSGAGAATMPSETRLTTVLDAVELKSGGKEVQKLDNFSNAAQLVVDGIMIPLLPEASESGKNQADKGKNGGTAFTYTITYTPESDKKDTQAGTPTNGAQTASNTAGDTNGKTKTYEVEVCCSNLNYLKYGMLTRKNSKSAMQAGESSSQADAKTEQVEQSMFLQGERTDEKEIPSEQNIVYRGSWYGYIANDKSTSWSGNASNATSGNRAEFTVNFADKKITGTLTADNRQEATFTIDGNIKDNGFEGTAKTAESGFDLDQSNTTRTPKAYITDAKVQGGFYGPKAEELGGWFAYPGDKQTKNATNASGNSSATVVFGAKRQ

SEQ ID NO: 140 - protein, 570 aa, Neisseria meningitidis
CLGGGGSFDLDSVETKQHNPQPEAPKYQDEQTEKPAKPDEASAAENDRPAYGFAVKIPRRNVHFNVKQGHQPLSDADWVKLAAGEPDKFPQKDEISNMTGGTLNESLQPGGDGKSRVEGYTDFKYVRSGYIYRDVNKIDPKNNIALFGPDGYLFYKGSNPSQALPTGKVGYKGTWDYVTDAKMGQKFPQLGNSKAGDRYGALSAQEEDVLRNKSEAPEGHTDFGLTSEFEVDFAAKTMTGALYRNNRITHNETENKDKRIKRYDIKADLHGNRFKGKALAADKDAGNGHPFVSDSDSLEGGFYGPQGDELGGKFLANDKKVLAVFSAKQKDGAEKPLAETFMDAYRIGSDFVKKQIDSFGNVAKLLIDGVELALVPSEGTQTAFQHVFKKDGVKVSSCCSNLDYLHFGVLEHGDSHDMFLQGSRTPVSDMPVTAGEAVYRGTWSGTIVNGTSWSAEPSDKEGGNRAEFKVNFAERTLNGMLTAKNHIAPVFTITAQIQGNGFSGTAKTGESGFALDPKSTIDSVYTRIQADVSGGFYGKNAIEMGGSFSGNTLKGESGKAAVVFGTKRQQ

SEQ ID NO: 141 - protein, 660 aa, Neisseria meningitidis
CLGGGGSFDLDSVDTEAPRPAPKYQDVSSETPQAQKDQGGYGFAMRFKRRNWYPKNEEDHKALSEADWEKLGAGKPDEFPQRNEILNMTDGILSESLQLGEGGKSRVEGYTDFQYVRSGYIYRNGANKIDFQKKIALSGPDGYLFYKGSNPSQALPMGKVGYKGTWDYVTDAKMGQKFSQLAGFPAGDRYGALSAEEADVLRNKSEAQQGQTDFGLTSEFEVDFAAKTMTGALYRNNRITNNETENKAKQIKRYDIQADLHGNRFSGKATATDKPKNDETKEHPFVSDSSSLSGGFFGPKGEELGFRFLSDDQKVAVVGSAKTKDKLENGAAASGSTGAAASGGAADMPSENGKLTTVLDAVELKSGGKEVKNLDNFSNAAQLVVDGIMIPLLPKESESESNQADKGKNGGTAFTRKFEHTPESDKKDTQAGTAENGNPAASNTAGDTNGKTKTYEVEVCCSNLNYLKYGMLTRKNSKSAMQAGENGSQADAKTEQVEQSMFLQGERTDEKEIPKEQQDIVYRGSWYGHIANDTSWSGNASDREGGNRADFTVNFGTKKINGTLTAENRQEATFTIVGDIKDNGFEGTAKTADSGFDLDQSNTTRTPKAYITDAKVKGGFYGPKAEELGGWFAYPGDKQTEKATVTSGDGNSASSATVVF

SEQ ID NO: 142 - protein, 660 aa, Neisseria meningitidis
CLGGGGSFDLDSVDTEAPRPAPKYQDVSSETPQAQKDQGGYGFAMRFKRRNWHPKNKEDHKALSEADWEKLGAGKPDEFPQKNEISAMDKGTLNESITPGDGKSRAEGYTDFQYVRSGYIYRNGVNKIDYQNNIALSGPDGYLFYKGSNPSQALPTGKAIYKGTWDYVTDAKEKQKFPQLGSFQAGDRYGALSAEEEDVLRNKSEAKEGQTDFGLTSEFEVDFAAKTMTGKLYRNNRITNNETENRDKQIKRYDIQANLHGNRFNGKATATDKPKENETKQHPFVSDSSSLSGGFFGPQGEELGFRFLSNDQKVAVVGSAKTQDKAANGNTAAASGDASVSASNGAAGTSSENGKLTTVLDAVELTLNDKKIKNLDNFSNAAQLVVDGIMIPLLPETSESGNNQADKGKNGGTAFTRKFDHTPKSDEKDTQAGTAANGAQTASGTAGDTSGKTKTYQVEVCCSNLNYLKYGMLTRKNSESAMQAGESSSQTPAAQTAQGAQSMFLQGERTDENKIPTDQNVVYRGSWYGHIASSTSWSGNASNATSGNRAEFTVNFDTKKITGKLTAENRQEATFTIDGKIEGNGFEGTAKTAELGFDLDQSNTTGTPKAYITNAKVQGGFYGPKAEELGGWFAYPGDKQTENTTVASGNGNSASSATVV

SEQ ID NO: 143 - protein, 670 aa, Neisseria meningitidis
CLGGGGSFDLDSVDTEAPRPAPKYQDVSSETPQAQKDQGGYGFAMRFKRRNWHPRGNPKEDKIELSENDWEQTDNGDIKNPSKQKKIINDLLGNGGALLQDSSQEGQSISKVTDHHDFQYVWSGFFYKQIQTKFETTDGKMTVRSGPDGYIFYKGKDPSRKLPVSGEVMYKGTWDFLTDVKTSQKFTDLGNTSTRPGDRYSAFSGELDYIVNKDSDKKDEHVGWGLTTEITVDFEKKTLSGKLIKNNRVNNDNDKHTTQYYSLDATLRGNRFNGKATATDKPKNDGETKEHPFVSDSSSLSGGFFGPQGEELGFRFLSKDQKVAVVGSAKTKDKPANGNTAEASGGTGAAASDGAAGTSSKNGKLTTVLDAVELKLGDKEVQKLDNFSNAAQLVVDGIMIPLLPEASESGNTNQGTNGGTAFTRKFEQMPESDEKDTKAQTGTGGTQTASNTAGDTNGKTKTYEVEVCCSNLNYLKYGMLTRKNSKSAMQAGESSSQADAKTEQVGQSMFLQGERTDEKEIPNDQNVVYRGSWYGHIANGTSWSGNASDKEGGNRADFTVNFGTKKINGTLTADNRQAATFTIVGDIEGNGFSGTAKTADSGFDLDQSNNTRTPKAYITNAKVQGGFYGPKAEELGGWFAYSDDKQTKNATDASGNGNSASSATVVFGAK

SEQ ID NO: 144 - protein, 660 aa, Neisseria meningitidis
FDLDSVDTEAPRPAPKYQDVSSEKPQAQKDQGGYGFAMRLKRRNWYRQANPKEDEIKLSENDWEQTDNGDIKNPSKQKNIINALTGNNGGASLQDSSQENQGISKVTGHHNFQYVWSGFFYKQIGSTFERKDSSITAARSGPDGYIFYKGKDPSRKLPVSGEVMYKGTWDFLTDVKTSQKFTDLGNTSTRPGDRYSAFSGGLDYIVNKDSDKKDEHVGWGLTTEITVDFEKKTLSGKLIKNNRVNNDNDKHTTQYYSLDATLRGNRFSGKAEATDKPKNDGETKEHPFVSDSSSLSGGFFGPKGEELGFRFLSDDQKVAVVGSAKTQDKPRNGAVASGGAGAAASNGAAGTSSENSKLTTVLDAVELTLNDKKIKNLDNFSNAAQLVVDGIMIPLLPEASESGKNQANQGTNGGTAFTRKFNHTPKSDEKDTQAGTAENGNPAASNTAGDANGKTKTYEVEVCCSNLNYLKYGMLTRKNSKSAMQAGESSSQADAKTEQVGQSMFLQGERTDEKEIPNDQNVVYRGSWYGHIANGTSWSGNASDKEGGNRADFTVNFGTKKINGTLTADNRQAATFTIVGDIEGNGFSGTAKTADSGFDLDQSNNTRTPKAYITNAKVQGGFYGPKAEELGGWFAYSDDKQTKNATDASGNGNSASSATV

SEQ ID NO: 145 - protein, 690 aa, Neisseria meningitidis
CLGGGGGSFDLDSVDTEAPRPAPKYQDVSSEKPQAQKDQGGYGFAMRLKRRNWYPSAKENEVKLNESDWETTGLPSNPKNLPERQKSVIDQVETDGDSNNSNIYSSPYLTQSNHQNGNTGNGVNQPKNEVTDYKNFKYVYSGWFYKHAKREVNLAVEPKSAKNGDDGYIFYHGKDPSRQLPASGKITYKGVWHFATDTKRGQKFREIIQPSKNQGDRYSGFSGDDDEQYSNKNESMLKDGHEGYGFTSNLEVDFDNKKLTGKLIRNNANQNNNTNNDKHTTQYYSLDATLKGNRFSGKAEATDKPKNDGETKEHPFVSDSSSLSGGFFGPQGEELGFRFLSNDQKVAVVGSAKTKDKPANGNTAEASGGTDAAASGGAAGTSSENSKLTTVLDAVELTHGGTAIKNLDNFSNAAQLVVDGIMIPLLPQNSTGKNNQPDQGKNGGTAFIYKTTYTPKNDDKDTKAQTVTGGTQTASNTAGDANGKTKTYEVEVCCSNLNYLKYGLLTRKTAGNTVGSGNSSPTAAAQTDAQSMFLQGERTDENKIPSEQNVVYRGSWYGHIASSTSWSGNASDKEGGNRAEFTVNFGEKKITGTLTAENRQEATFTIDGKIEGNGFSGTAKTAELGFDLDQKNTTRTPKAYITDAKVKGGFYGPKAEELGGWFAYSDDKQTKNATDASGNGNSASSATVVF

SEQ ID NO: 146 - protein, 690 aa, Neisseria meningitidis
CLGGGGSFDLDSVDTEAPRPAPKYQDVSSEKPQAQKDQGGYGFAMRLKRRNWYPQAKEDEVKLNESDWEATGLPTEPKKLPLKQESVISKVQANNGDNNIYTSPYLTQSNHQNGNTGNGANLPKNEVTNYKDFKYVYSGWFYKHARNEIIRENSSIKGAKNGDDGYIFYHGKEPSRQLPASGTVTYKGMWHFATDVKKSQNFRDIIQPSKKQGDRYSGFSGDDDEQYSNKNESMLKDDQEGYGFTSNLEVDFNNKKLTGKLIRNDKVTNATTSGKHTTQYYSLEAQVTGNRFNGKATATDKPGTGETKQHPFVSDSSSLSGGFFGPKGEELGFRFLSDDKKVAVVGSAKTKDKTENGAAASGGAGAAASGGAAAMPSENGKLTTVLDAVELTHGGTAIKNLDNFSNAAQLVVDGIMIPLLPEASESGHNQANQGTNGGTAFTRKFDHTPESDKKDAQAGTQTNGAQTASNTAGDTNGKTKTYEVEVCCSNLNYLKYGMLTRKNSKSAMQAGENGSQADAKTEQVEQSMFLQGERTDEKEIPKEQQDIVYRGSWYGHIANDTSWSGNASDREGGNRADFTVNFGTKKINGTLTAENRQEATFTIVGDIKDNGFEGTAKTADSGFDLDQSNTTRTPKAYITDAKVKGGFYGPKAEELGGWFAYPGDKQTEKATVTSGDGNSASSATVVFGAK

SEQ ID NO: 147 - protein, 690 aa, Neisseria meningitidis
CLGGGGSFDLDSVDTEAPRPAPKYQDVSSEKPQAQKDQGGYGFAMRFKRRNLHPMAKENEVKLKNDDWEATGLPTNPKELPKRQESVIEQVKTDDGSNIYSSPYLTQSNHPNGSAGNSVNQPKNQARDYENFQYVYSGWFYKHAAREMDVSTKKFKLGDDGYIFYHGKEPSRQLPVSEKITYKGVWHFVTDTKNGQKFYDIIQSSKKQGDRYSGFSGDEGEEYSNKNEETLKSDHEGYGFTSNLEVDFGNKKLTGKLIRNNASLSNTNNDKHTTQYYSLDATLRGNRFNGTATATDKPEQDGTKQHPFVSDSSSLSGGFFGPQGEELGFRFLSNDKKVAVVGSAKTKDKPRNGAVASGGAGAAASNGAAGTSSENSKLTTVLDAVELTLNDKKIKNLDNFSNAAQLVVDGIMIPLLPQNSTGENNQPDQGKTGGTAFIYKTTYTPKNDDKDTKAQTGAAGSSGAQTASGTESVTGGQAGTKTYEVEVCCSNLNYLKYGLLTRKTASNTGEGGNGSQTAAQTAQGAQSMFLQGERTDEKEIPNDQNVVYRGSWYGYIANDTSWSGNASDKEGGNRAEFTVNFGEKKINGKLTAENRQEATFTIEGMIQGNGFEGTAKTADLGFDLDQSNTTGTPKAYITNAKVQGGFYGPKAEELGGWFAYPGDKQTENTTVASGNGNSASSATVVFGAKR

SEQ ID NO: 148 - protein, 575 aa, Neisseria meningitidis
CLGGGGSFDLDSVETVQDMHSKPKYEDEKSQPESQQDVSENSGAAYGFAVKLPRRNAHFNPKYKEKHKPLGSMDWKKLQRGEPNSFSERDELEKKRGSSELIESKWEDGQSRVVGYTNFTYVRSGYVYLNKNNIDIKNNIVLFGPDGYLYYKGKEPSKELPSEKITYKGTWDYVTDAMEKQRFEGLGSAAGGDKSGALSALEEGVLRNQAEASSGHTDFGMTSEFEVDFSDKTIKGTLYRNNRITQNNSENKQIKTTRYTIQATLHGNRFKGKALAADKGATNGSHPFISDSDSLEGGFYGPKGEELAGKFLSNDNKVAAVFGAKQKDKKDGENAAGPATETVIDAYRITGEEFKKEQIDSFGDVKKLLVDGVELSLLPSEGNKAAFQHEIEQNGVKATVCCSNLDYMSFGKLSKENKDDMFLQGVRTPVSDVAARTEANAKYRGTWYGYIANGTSWSGEASNQEGGNRAEFDVDFSTKKISGTLTAKDRTSPAFTITAMIKDNGFSGVAKTGENGFALDPQNTGNSHYTHIEATVSGGFYGKNAIEMGGSFSFPGNAPEGKQEKASVVFGAKRQ

SEQ ID NO: 149 - DNA, 1707 bp, Neisseria meningitidis
ggatcttctgaaaacagtaagctgaccacggttttggatgcggttgaattgacactaaacgacaagaaaatcaaaaatctcgacaacttcagcaatgccgcccaactggttgtcgacggcattatgattccgctcctgcccaaggattccgaaagcgggaacactcaggcagataaaggtaaaaacggcggaacagaatttacccgcaaatttgaacacacgccggaaagtgataaaaaagacgcccaagcaggtacgcagacgaatggggcgcaaaccgcttcaaatacggcaggtgataccaatggcaaaacaaaaacctatgaagtcgaagtctgctgttccaacctcaattatctgaaatacggaatgttgacgcgcaaaaacagcaagtccgcgatgcaggcaggaggaaacagtagtcaagctgatgctaaaacggaacaagttgaacaaagtatgttcctccaaggcgagcgtaccgatgaaaaagagattccaaccgaccaaaacgtcgtttatcgggggtcttggtacgggcatattgccaacggcacaagctggagcggcaatgcttctgataaagagggcggcaacagggcggaatttactgtgaattttgccgataaaaaaattaccggcaagttaaccgctgaaaacaggcaggcgcaaacctttaccattgagggaatgattcagggcaacggctttgaaggtacggcgaaaactgctgagtcaggttttgatctcgatcaaaaaaataccacccgcacgcctaaggcatatatcacagatgccaaggtaaagggcggtttttacgggcctaaagccgaagagttgggcggatggtttgcctatccgggcgataaacaaacggaaaaggcaacagctacatccagcgatggaaattcagcaagcagcgcgaccgtggtattcggtgcgaaacgccaacagcctgtgcaaggggaaaacgcggcagggcctgcaacggaaaccgtgatagatgcataccgtattaccggcgaggagtttaagaaagagcaaatagacagttttggagatgtgaaaaagctgctggttgacggagtggagctttcactgctgccgtctgagggcaataaggcggcatttcagcacgagattgagcaaaacggcgtgaaggcaacggtgtgttgttccaacttggattacatgagttttgggaagctgtcaaaagaaaataaagacgatatgttcctgcaaggtgtccgcactccagtatccgatgtggcggcaaggacggaggcaaacgccaaatatcgcggtacttggtacggatatattgccaacggcacaagctggagcggcgaagcctccaatcaggaaggtggtaatagggcagagtttgacgtggatttttccactaaaaaaatcagtggcacactgacggcaaaagaccgtacgtctcctgcgtttactattactgccatgattaaggacaacggtttttcaggtgtggcgaaaaccggtgaaaacggctttgcgctggatccgcaaaataccggaaattcccactatacgcatattgaagccactgtatccggcggtttctacggcaaaaacgccatcgagatgggcggatcgttctcatttccgggaaatgcaccagagggaaaacaagaaaaagcatcggtggtattcggtgcgaaacgccaacagcttgtgcaa

SEQ ID NO: 150 - protein, 569 aa, Neisseria meningitidis
GSSENSKLTTVLDAVELTLNDKKIKNLDNFSNAAQLVVDGIMIPLLPKDSESGNTQADKGKNGGTEFTRKFEHTPESDKKDAQAGTQTNGAQTASNTAGDTNGKTKTYEVEVCCSNLNYLKYGMLTRKNSKSAMQAGGNSSQADAKTEQVEQSMFLQGERTDEKEIPTDQNVVYRGSWYGHIANGTSWSGNASDKEGGNRAEFTVNFADKKITGKLTAENRQAQTFTIEGMIQGNGFEGTAKTAESGFDLDQKNTTRTPKAYITDAKVKGGFYGPKAEELGGWFAYPGDKQTEKATATSSDGNSASSATVVFGAKRQQPVQGENAAGPATETVIDAYRITGEEFKKEQIDSFGDVKKLLVDGVELSLLPSEGNKAAFQHEIEQNGVKATVCCSNLDYMSFGKLSKENKDDMFLQGVRTPVSDVAARTEANAKYRGTWYGYIANGTSWSGEASNQEGGNRAEFDVDFSTKKISGTLTAKDRTSPAFTITAMIKDNGFSGVAKTGENGFALDPQNTGNSHYTHIEATVSGGFYGKNAIEMGGSFSFPGNAPEGKQEKASVVFGAKRQQLVQ

SEQ ID NO: 151 - DNA, 2733 bp, Neisseria meningitidis
atgcaacagcaacatttgttccgattaaatattttatgcctgtcgctgatgactgcgctgcctgcttatgcagaaaatgtgcaagccggacaagcacaggaaaaacagttggataccatacaggtaaaagccaaaaaacagaaaacccgccgcgataacgaagtaaccggtctgggcaaattggtcaaaaccgccgacaccctcagcaaggaacaggtactcgatatccgcgacctgacgcgttacgaccccggcatcgccgtggtcgaacaggggcgcggcgcaagttcgggctactcgatacgcggtatggacaaaaaccgcgtttccttgacggtggacggcttggcgcaaatacagtcctacaccgcgcaggcggcattgggcgggacgaggacggcgggcagcagcggcgcaatcaatgaaatcgagtatgaaaacgtcaaagctgtcgaaatcagcaaaggctcaaactcggtcgaacaaggcagcggcgcattggcgggttcggtcgcatttcaaaccaaaaccgccgacgatgttatcggggaaggcaggcagtggggcattcagagtaaaaccgcctattccggcaaaaaccgggggcttacccaatccatcgcgctggcggggcgcatcggcggtgcggaggctttgctgatccacaccgggcggcgcgcgggggaaatccgcgcacacgaagatgccggacgcggcgttcagagctttaacaggctggtgccggttgaagacagcagcgaatacgcctatttcatcgttgaagatgaatgcgaaggcaaaaattacgaaacgtgtaaaagcaaaccgaaaaaagatgttgtcggcaaagacgaacgtcaaacggtttccacccgagactacacgggccccaaccgcttcctcgccgatccgctttcatacgaaagccgatcgtggctgttccgcccgggttttcgttttgaaaacaaacggcactacatcggcggcatactcgaacacacgcaacaaactttcgacacgcgcgatatgacggttccggcattcctgaccaaggcggtttttgatgcaaattcaaaacaggcgggttctttgcccggcaacggcaaatacgcgggcaaccacaaatacggcggactgtttaccaacggcgaaaacggtgcgctggtgggcgcggaatacggtacgggcgtgttttacgacgagacgcacaccaaaagccgctacggtttggaatatgtctataccaatgccgataaagacacttgggcggattatgcccgcctctcttacgaccggcagggcatcggtttggacaatcattttcagcagacgcactgttctgccgacggttcggacaaatattgccgcccgagtgccgacaagccgttttcctattacaaatccgaccgcgtgatttacggggaaagccacaggctcttgcaggcggcattcaaaaaatccttcgataccgccaaaatccgccacaacctgagcgtgaatctcgggtttgaccgctttgactctaatctccgccatcaggattattattatcaacatgccaaccgcgcctattcgtcgaaaacgccccctaaaaccgccaaccccaacggcgacaagagcaaaccctattgggtcagcataggcgggggaaatgtggttacggggcaaatctgcctctttggcaacaatacttatacggactgcacgccgcgcagcatcaacggcaaaagctattacgcggcagttcgggacaatgtccgtttgggcaggtgggcggatgtcggcgcggggttgcgctacgactaccgcagcacgcattcggacgacggcagcgtttccaccggcacgcaccgcaccctgtcctggaacgccggcatcgtcctcaaacctgccgactggctggatttgacttaccgcacttcaaccggcttccgcctgccctcgtttgcggaaatgtacggctggcggtcgggtgttcaaagcaaggcggtcaaaatcgatccggaaaaatcgttcaacaaagaagccggcatcgtgtttaaaggcgatttcggcaacttggaggcaagttggttcaacaatgcctaccgcgatttgattgtccggggttatgaagcgcaaattaaaaacggcaaagaagaagccaaaggcgacccggcttacctcaatgcccaaagcgcgcggattaccggcatcaatattttgggcaaaatcgattggaacggcgtatgggataaattgcccgaaggttggtattctacatttgcctataatcgtgtccatgtccgcgacatcaaaaaacgcgcagaccgcaccgatattcaatcacacctgtttgatgccatccaaccctcgcgctatgtcgtcggcttgggctatgaccaaccggaaggcaaatggggtgtgaacggtatgctgacttattccaaagccaaggaaatcacagagttgttgggcagccgggctttgctcaacggcaacagccgcaatacaaaagccaccgcgcgccgtacccgcccttggtatattgtggatgtgtccggttattacacgattaaaaaacacttcaccctccgtgcgggcgtgtacaacctcctcaactaccgctatgttacttgggaaaatgtgcggcaaactgccggcggcgcagtcaaccaacacaaaaatgtcggcgtttacaaccgatatgccgcccccggccgaaactacacatttagcttggaaatgaagttt

SEQ ID NO: 152 - protein, 911 aa, Neisseria meningitidis
MQQQHLFRLNILCLSLMTALPAYAENVQAGQAQEKQLDTIQVKAKKQKTRRDNEVTGLGKLVKTADTLSKEQVLDIRDLTRYDPGIAVVEQGRGASSGYSIRGMDKNRVSLTVDGLAQIQSYTAQAALGGTRTAGSSGAINEIEYENVKAVEISKGSNSVEQGSGALAGSVAFQTKTADDVIGEGRQWGIQSKTAYSGKNRGLTQSIALAGRIGGAEALLIHTGRRAGEIRAHEDAGRGVQSFNRLVPVEDSSEYAYFIVEDECEGKNYETCKSKPKKDVVGKDERQTVSTRDYTGPNRFLADPLSYESRSWLFRPGFRFENKRHYIGGILEHTQQTFDTRDMTVPAFLTKAVFDANSKQAGSLPGNGKYAGNHKYGGLFTNGENGALVGAEYGTGVFYDETHTKSRYGLEYVYTNADKDTWADYARLSYDRQGIGLDNHFQQTHCSADGSDKYCRPSADKPFSYYKSDRVIYGESHRLLQAAFKKSFDTAKIRHNLSVNLGFDRFDSNLRHQDYYYQHANRAYSSKTPPKTANPNGDKSKPYWVSIGGGNVVTGQICLFGNNTYTDCTPRSINGKSYYAAVRDNVRLGRWADVGAGLRYDYRSTHSDDGSVSTGTHRTLSWNAGIVLKPADWLDLTYRTSTGFRLPSFAEMYGWRSGVQSKAVKIDPEKSFNKEAGIVFKGDFGNLEASWFNNAYRDLIVRGYEAQIKNGKEEAKGDPAYLNAQSARITGINILGKIDWNGVWDKLPEGWYSTFAYNRVHVRDIKKRADRTDIQSHLFDAIQPSRYVVGLGYDQPEGKWGVNGMLTYSKAKEITELLGSRALLNGNSRNTKATARRTRPWYIVDVSGYYTIKKHFTLRAGVYNLLNYRYVTWENVRQTAGGAVNQHKNVGVYNRYAAPGRNYTFSLEMKF

SEQ ID NO: 153 - DNA, 760 bp, Neisseria meningitidis
ggatcctcgtctgaaaacagtaagctgaccacggttttggatgcggttgaattgacactaaacgacaagaaaatcaaaaatctcgacaacttcagcaatgccgcccaactggttgtcgacggcattatgattgatctggccggaacagaatttacccgcaaatttgaacacacggccaaggaaatcacagagttgttgggcagccgggctttgctcaacggcaacagccgcaatacaaaagccaccgcgcgccgtacccgcacctatgaagtcgaagtctgctgttccaaaacaaagtatgttcctccaaggcgagcgtaccgatgaaaaagagattccaaccgaccaaaacgtcgtttatcgggggtcttggtacgggcatattgccaacggcacaagctggagcggcaatgcttctgataaagagggcggcaacagggcggaatttactgtgaattttgccgataaaaaaattaccggcaagttaaccgctgaaaacaggcaggcgcaaacctttaccattgagggaatgattcagggcaacggctttgaaggtacggcgaaaactgctgagtcaggttttgatctcgatcaaaaaaataccacccgcacgcctaaggcatatatcacagatgccaaggtaaagggcggtttttacgggcctaaagccgaagagttgggcggatggtttgcctatcataaaagcgataacggcagcgcgaccgtggtattcggtgcgaaacgccaacagcctgtgcaa

SEQ ID NO: 154 - protein, 270 aa, Neisseria meningitidis
GSSSENSKLTTVLDAVELTLNDKKIKNLDNFSNAAQLVVDGIMIDLAGTEFTRKFEHTAKEITELLGSRALLNGNSRNTKATARRTRTYEVEVCCSNLNYLKYGMLTRKGKQVEQSMFLQGERTDEKEIPTDQNVVYRGSWYGHIANGTSWSGNASDKEGGNRAEFTVNFADKKITGKLTAENRQAQTFTIEGMIQGNGFEGTAKTAESGFDLDQKNTTRTPKAYITDAKVKGGFYGPKAEELGGWFAYHKSDNGSATVVFGAKRQQPVQ

SEQ ID NO: 155 - DNA, 807 bp, Neisseria meningitidis
ggatcctcgtctgaaaacagtaagctgaccacggttttggatgcggttgaattgacactaaacgacaagaaaatcaaaaatctcgacaacttcagcaatgccgcccaactggttgtcgacggcattatgattgatctggccggaacagaatttacccgcaaatttgaacacacgattaacggcaaaacctatgaagtcgaagtctgctgttccaacctcaattatctgaaatacggaatgttgacgcgcaaagttacttgggaaaatgtgcggcaaactgccggcggcgcagtcaaccaacacaaaaatgtcggcgtttacaaccgatatgccgttgaacaaagtatgttcctccaaggcgagcgtaccgatgaaaaagagattccaaccgaccaaaacgtcgtttatcgggggtcttggtacgggcatattgccaacggcacaagctggagcggcaatgcttctgataaagagggcggcaacagggcggaatttactgtgaattttgccgataaaaaaattaccggcaagttaaccgctgaaaacaggcaggcgcaaacctttaccattgagggaatgattcagggcaacggctttgaaggtacggcgaaaactgctgagtcaggttttgatctcgatcaaaaaaataccacccgcacgcctaaggcatatatcacagatgccaaggtaaagggcggtttttacgggcctaaagccgaagagttgggcggatggtttgcctatcataaaagcgataacggcagcgcgaccgtggtattcggtgcgaaacgccaacagcctgtgcaa

SEQ ID NO: 156 - protein, 269 aa, Neisseria meningitidis
GSSSENSKLTTVLDAVELTLNDKKIKNLDNFSNAAQLVVDGIMIDLAGTEFTRKFEHTINGKTYEVEVCCSNLNYLKYGMLTRKVTWENVRQTAGGAVNQHKNVGVYNRYAVEQSMFLQGERTDEKEIPTDQNVVYRGSWYGHIANGTSWSGNASDKEGGNRAEFTVNFADKKITGKLTAENRQAQTFTIEGMIQGNGFEGTAKTAESGFDLDQKNTTRTPKAYITDAKVKGGFYGPKAEELGGWFAYHKSDNGSATVVFGAKRQQPVQ

SEQ ID NO: 157 - DNA, 759 bp, Neisseria meningitidis
ggatcctcgtctgaaaacagtaagctgaccacggttttggatgcggttgaattgacactaaacgacaagaaaatcaaaaatctcgacaacttcagcaatgccgcccaactggttgtcgacggcattatgattgatctggccggaacagaatttacccgcaaatttgaacacacgattaacggcaaaacctatgaagtcgaagtctgctgttccaacctcaattatctgaaatacggaatgttgacgcgcaaaggcaaacaggttgaacaaagtatgttcctccaaggcgagcgtaccgatgaaaaagagattccaaccgaccaaaacgtcgtttatcgggggtcttggtacgggcatattgccaacggcacaagctggagcggcaatgcttctgataaagagggcggcaacagggcggaatttactgtgaattttgccgataaaaaaattaccggcaagttaaccgctgaaaacaggcaggcgcaaacctttaccattgagggaatgattcagggcaacggctttgaaggtacggcgaaaactgctgagtcaggttttgatctcgatcaaaaaaataccacccgcacgcctaaggcatatatcacagatgccaaggtaaagggcggtttttacgggcctaaagccgaagagttgggcggatggtttgcctataccgcgcaggcggcattgggcgggacgaggacggcgggcagcagcgcgaccgtggtattcggtgcgaaacgccaacagcctgtgcaa

SEQ ID NO: 158 - protein, 253 aa, Neisseria meningitidis
GSSSENSKLTTVLDAVELTLNDKKIKNLDNFSNAAQLVVDGIMIDLAGTEFTRKFEHTINGKTYEVEVCCSNLNYLKYGMLTRKGKQVEQSMFLQGERTDEKEIPTDQNVVYRGSWYGHIANGTSWSGNASDKEGGNRAEFTVNFADKKITGKLTAENRQAQTFTIEGMIQGNGFEGTAKTAESGFDLDQKNTTRTPKAYITDAKVKGGFYGPKAEELGGWFAYTAQAALGGTRTAGSSATVVFGAKRQQPVQ

SEQ ID NO: 159 - DNA, 774 bp, Neisseria meningitidis
ggatcctcgtctgaaaacagtaagctgaccacggttttggatgcggttgaattgacactaaacgacaagaaaatcaaaaatctcgacaacttcagcaatgccgcccaactggttgtcgacggcattatgattccactcctcccagccacaaaagccgtctttgatgagaaccgcaaatacggcccggaatttacccgcaaatttgaacacacgattaacggcaaaacctatgaagtcgaagtctgctgttccaacctcaattatctgaaatacggaatgttgacgcgcaaaggcaaacaggttgaacaaagtatgttcctccaaggcgagcgtaccgatgaaaaagagattccaaccgaccaaaacgtcgtttatcgggggtcttggtacgggcatattgccaacggcacaagctggagcggcaatgcttctgataaagagggcggcaacagggcggaatttactgtgaattttgccgataaaaaaattaccggcaagttaaccgctgaaaacaggcaggcgcaaacctttaccattgagggaatgattcagggcaacggctttgaaggtacggcgaaaactgctgagtcaggttttgatctcgatcaaaaaaataccacccgcacgcctaaggcatatatcacagatgccaaggtaaagggcggtttttacgggcctaaagccgaagagttgggcggatggtttgcctatcataaaagcgataacggcagcgcgaccgtggtattcggtgcgaaacgccaacagcctgtgcaa

SEQ ID NO: 160 - protein, 258 aa, Neisseria meningitidis
GSSSENSKLTTVLDAVELTLNDKKIKNLDNFSNAAQLVVDGIMIPLLPATKAVFDENRKYGPEFTRKFEHTINGKTYEVEVCCSNLNYLKYGMLTRKGKQVEQSMFLQGERTDEKEIPTDQNVVYRGSWYGHIANGTSWSGNASDKEGGNRAEFTVNFADKKITGKLTAENRQAQTFTIEGMIQGNGFEGTAKTAESGFDLDQKNTTRTPKAYITDAKVKGGFYGPKAEELGGWFAYHKSDNGSATVVFGAKRQQPVQ

SEQ ID NO: 161 - DNA, 2832 bp, Neisseria meningitidis
atgaataagaaacacggttttccgctgactctgactgccttggccattgcaaccgcttttccggcttatgctgcccaagcggggggggcgacacctgatgccgcgcagacccaatccctgaaagagattaccgtccgtgccgccaaagtgggacggcgatcgaaagaggcgaccggtttgggcaaaatcgtcaaaacgtcggaaacgttgaacaaagaacaggtactcggtatccgcgacctgacgcgctacgatccgggcgtggcggttgtcgaacagggcaacggcgcgagcggcggctactcgatacgcggcgtggataaaaaccgtgtggcggtttcggtcgacggtgttgcccaaatacaggcgtttaccgtgcagggatcgttgagcggatacggcggacgcggcggcagcggtgcaatcaacgaaatcgaatatgaaaacatcagcacggtggaaatcgacaaaggtgccggttcgtccgatcacggcagcggcgcactcggcggcgcggtcgccttccgcaccaaagaggcggcagacctgatttcagacggcaaaagttgggggatacaggcaaaaaccgcctacggcagtaaaaaccgccaatttatgaagtcgctcggcgcggggttcagcaaagacggttgggaagggctgttaatccgaaccgaacgccaagggcgggaaacgcgcccgcacggcgatattgcggacggggtggaatacggcatagaccgtttggacgcgttccgtcagacatacgatattaaacgcaagacaagagagccatttttctcagtagagggcgagcgtgaatccaagcccgtggcaaaattggcgggctacgggaaatatttgaacaaccagctcaaccgctgggtaaaagaacgtattgaacaaaatcagcctttaagtgctgaagaagaggcgcaggtgcgggaggcgcaggcgcgccacgaaaatctgtccgcccaagcttacacgggcggcggcaggatattgcccgatccgatggattaccgcagcggctcttggcttgccaagctgggctaccgcttcggcggcaggcattatgtcggcggcgtgtttgaggataccaaacagcgttacgatatccgcgatatgacggaaaaacagtattacggtacggacgaggcggaaaagtttagagacaagagcggggtgtacgacggcgacgatttccgcgacggcttgtattttgtgccgaatatagaagagtggaagggcgataaaaatttggtcaggggcataggtttgaaatattcccgcaccaaatttattgacgaacatcaccgccgccgccgtatgggtttgctgtatcgttatgaaaacgaagcgtattctgacaattgggcggataaggcggtgttgtcgtttgacaaacagggcgtggcaaccgataacaacacgctgaagctgaattgcgccgtgtatcctgctgtggacaaatcctgccgcgcgtcggcggacaaaccgtattcctacgacagcagcgaccgtttccactaccgcgaacagcacaatgttttgaatgcctcgtttgagaaatcgctgaaaaacaaatggacgaaacaccatctgactttgggcttcggttacgatgcttccaaagcgatttcccgccccgaacagctttcccacaatgcggcaaggatttcggaatccacgggattcgatgaaaacaatcaagataagtatcttttgggtaagcccgaagtcgtcgaagggtcggtctgcggctacatcgaaaccctgcgttcccgcaaatgcgtgccaagaaaaatcaacggcagcaatatccatatttctttgaacgaccgtttttcaatcggcaaatatttcgatttcagcttgggcggcaggtacgaccggaaaaacttcaccacgtcggaagaactcgtccgcagcgggcggtatgttgaccgttcgtggaacagcggcatcttgttcaaaccgaaccggcatttttccgtgtcttaccgtgcctccagcggcttcagaacgccctcattccaagaacttttcgggatagacatttatcacgattatccgaaaggctggcagcgtcccgccctgaaatcggaaaaggcagccaaccgggaaatcggtttgcagtggaagggcgatttcggctttttggaaatcagcagcttccgcaaccgttataccgatatgattgccgttgccgatcacaaaaccaaattgccgaatcaggcaggacaattgacagagattgatatacgcgattattacaatgcccaaaatatgtcgcttcaaggcgttaatatattgggaaaaatcgactggaacggcgtgtatggcaaactgcccgaaggtttgtacaccacattggcgtacaaccgcatcaaaccgaaatcggtatccaaccggccgggactgtccctccgcagctatgctttggatgcggtacagccgtcgcgttatgttttggggttcggatacgaccagcctgaggggaaatggggcgcaaacattatgctgacctattccaaagggaaaaaccctgacgagcttgcttatctggcaggcgatcaaaaacgatattcgacaaaaagagcgtcgtcttcttggtcgacggcagacgtttccgcctatctgaatctgaaaaaacggctgaccttgagggcggctatctacaatatcggcaactaccgctacgttacttgggaatccttgcgccagactgcggaaagcacggcaaaccggcacggcggcgacagcaactatggaaggtatgccgcaccgggcaggaacttcagtctcgcgctcgaaatgaagttttaa

SEQ ID NO: 162 - protein, 943 aa, Neisseria meningitidis
MNKKHGFPLTLTALAIATAFPAYAAQAGGATPDAAQTQSLKEITVRAAKVGRRSKEATGLGKIVKTSETLNKEQVLGIRDLTRYDPGVAVVEQGNGASGGYSIRGVDKNRVAVSVDGVAQIQAFTVQGSLSGYGGRGGSGAINEIEYENISTVEIDKGAGSSDHGSGALGGAVAFRTKEAADLISDGKSWGIQAKTAYGSKNRQFMKSLGAGFSKDGWEGLLIRTERQGRETRPHGDIADGVEYGIDRLDAFRQTYDIKRKTREPFFSVEGERESKPVAKLAGYGKYLNNQLNRWVKERIEQNQPLSAEEEAQVREAQARHENLSAQAYTGGGRILPDPMDYRSGSWLAKLGYRFGGRHYVGGVFEDTKQRYDIRDMTEKQYYGTDEAEKFRDKSGVYDGDDFRDGLYFVPNIEEWKGDKNLVRGIGLKYSRTKFIDEHHRRRRMGLLYRYENEAYSDNWADKAVLSFDKQGVATDNNTLKLNCAVYPAVDKSCRASADKPYSYDSSDRFHYREQHNVLNASFEKSLKNKWTKHHLTLGFGYDASKAISRPEQLSHNAARISESTGFDENNQDKYLLGKPEVVEGSVCGYIETLRSRKCVPRKINGSNIHISLNDRFSIGKYFDFSLGGRYDRKNFTTSEELVRSGRYVDRSWNSGILFKPNRHFSVSYRASSGFRTPSFQELFGIDIYHDYPKGWQRPALKSEKAANREIGLQWKGDFGFLEISSFRNRYTDMIAVADHKTKLPNQAGQLTEIDIRDYYNAQNMSLQGVNILGKIDWNGVYGKLPEGLYTTLAYNRIKPKSVSNRPGLSLRSYALDAVQPSRYVLGFGYDQPEGKWGANIMLTYSKGKNPDELAYLAGDQKRYSTKRASSSWSTADVSAYLNLKKRLTLRAAIYNIGNYRYVTWESLRQTAESTANRHGGDSNYGRYAAPGRNFSLALEMKF

SEQ ID NO: 163 - DNA, 768 bp, Neisseria meningitidis
ggatcctcgtctgaaaacagtaagctgaccacggttttggatgcggttgaattgacactaaacgacaagaaaatcaaaaatctcgacaacttcagcaatgccgcccaactggttgtcgacggcattatgattgatctggccggaacagaatttacccgcaaatttgaacacacgctcaaccgctgggtaaaagaacgtattgaacaaaatcagcctttaacctatgaagtcgaagtctgctgttccaacctcaattatctgaaatacggaatgttgacgcgcaaaggcaaacaggttgaacaaagtatgttcctccaaggcgagcgtaccgatgaaaaagagattccaaccgaccaaaacgtcgtttatcgggggtcttggtacgggcatattgccaacggcacaagctggagcggcaatgcttctgataaagagggcggcaacagggcggaatttactgtgaattttgccgataaaaaaattaccggcaagttaaccgctgaaaacaggcaggcgcaaacctttaccattgagggaatgattcagggcaacggctttgaaggtacggcgaaaactgctgagtcaggttttgatctcgatcaaaaaaataccacccgcacgcctaaggcatatatcacagatgccaaggtaaagggcggtttttacgggcctaaagccgaagagttgggcggatggtttgcctatcataaaagcgataacggcagcgcgaccgtggtattcggtgcgaaacgccaacagcctgtgcaa

SEQ ID NO: 164 - protein, 256 aa, Neisseria meningitidis
GSSSENSKLTTVLDAVELTLNDKKIKNLDNFSNAAQLVVDGIMIDLAGTEFTRKFEHTLNRWVKERIEQNQPLTYEVEVCCSNLNYLKYGMLTRKGKQVEQSMFLQGERTDEKEIPTDQNVVYRGSWYGHIANGTSWSGNASDKEGGNRAEFTVNFADKKITGKLTAENRQAQTFTIEGMIQGNGFEGTAKTAESGFDLDQKNTTRTPKAYITDAKVKGGFYGPKAEELGGWFAYHKSDNGSATVVFGAKRQQPVQ

SEQ ID NO: 165 - DNA, 777 bp, Neisseria meningitidis
ggatcctcgtctgaaaacagtaagctgaccacggttttggatgcggttgaattgacactaaacgacaagaaaatcaaaaatctcgacaacttcagcaatgccgcccaactggttgtcgacggcattatgattccactcctcccatacggtacggacgaggcggaaaagtttagagacaagagcggggtggaatttacccgcaaatttgaacacacgattaacggcaaaacctatgaagtcgaagtctgctgttccaacctcaattatctgaaatacggaatgttgacgcgcaaaggcaaacaggttgaacaaagtatgttcctccaaggcgagcgtaccgatgaaaaagagattccaaccgaccaaaacgtcgtttatcgggggtcttggtacgggcatattgccaacggcacaagctggagcggcaatgcttctgataaagagggcggcaacagggcggaatttactgtgaattttgccgataaaaaaattaccggcaagttaaccgctgaaaacaggcaggcgcaaacctttaccattgagggaatgattcagggcaacggctttgaaggtacggcgaaaactgctgagtcaggttttgatctcgatcaaaaaaataccacccgcacgcctaaggcatatatcacagatgccaaggtaaagggcggtttttacgggcctaaagccgaagagttgggcggatggtttgcctatcataaaagcgataacggcagcgcgaccgtggtattcggtgcgaaacgccaacagcctgtgcaa

SEQ ID NO: 166 - protein, 259 aa, Neisseria meningitidis
GSSSENSKLTTVLDAVELTLNDKKIKNLDNFSNAAQLVVDGIMIPLLPYGTDEAEKFRDKSGVEFTRKFEHTINGKTYEVEVCCSNLNYLKYGMLTRKGKQVEQSMFLQGERTDEKEIPTDQNVVYRGSWYGHIANGTSWSGNASDKEGGNRAEFTVNFADKKITGKLTAENRQAQTFTIEGMIQGNGFEGTAKTAESGFDLDQKNTTRTPKAYITDAKVKGGFYGPKAEELGGWFAYHKSDNGSATVVFGAKRQQPVQ

SEQ ID NO: 167 - DNA, 1062 bp, Haemophilus influenzae
ggatccgcgaccaccagcaccaccgcgaacgcgaaaaccgatgcgaccaccaacgcggaaaactttaccaccaaagatattagcagctttggcgaagcggattatctgctgattgataactatccggtgccgctgctgccggaaaccgaaaacagcggcgattttgcgaccagcaaacattatgaagtgcgcgataaaacctataaagtggaagcgtgctgcaaaaacctgagctatgtgaaatttggcatgtattatgaaaccaaacgcccggcggcgaaaccgaaagcgcagaaaaaaaaacgcaaaaaaaaaaaaaccggcgtgaaaagcgtgaaaaaaggcaaaaaaaaaattaaaaaaaaaaaaggcaccaaaaaagcggcggtgaaaaaaaaaggcagcaaaaaaaaagcggtgaaaggcaaaaaaaaagcgaaaaaaccgaaaaaaaaaagcccgaccaaaaaaggcggcagcggcagcaaaggcattctgccggcgccgaaagcgccgaaaggccgcaacattaaatatcatcagtttctgctgggcctgcgcaccgcgagcagcaaaattccgaccaccggcaacgtgaaatatcgcggcagctggtttggctatattagcgatggcgaaaccagctatagcaccaccggcgataaacgccaggataaaaacgcggtggcggaatttgatgtgaactttgcggaaaaaaccctgaaaggcagcctgaaacgcgcggatagccagaacccggtgtttagcattgaagcgaactttaaaaacggcggcaacgcgtttaccggcaccgcgaccgcgaaagatctggtgattgatggcaaaaacagccagaccaaaaacaccccgattaacattaccaccaaagtgaacggcgcgttttatggcccgaacgcgagcgaactgggcggctattttacctataacggcaaaaacccgaccgataaaaacagcccgaccgcgagcagcccgagcaacagcgaaaaagcgcgcgcggcggtggtgtttggcgcgaaaaaacaggtggaaaccaacaacaaa

SEQ ID NO: 168 - protein, 354 aa, Haemophilus influenzae
GSATTSTTANAKTDATTNAENFTTKDISSFGEADYLLIDNYPVPLLPETENSGDFATSKHYEVRDKTYKVEACCKNLSYVKFGMYYETKRPAAKPKAQKKKRKKKKTGVKSVKKGKKKIKKKKGTKKAAVKKKGSKKKAVKGKKKAKKPKKKSPTKKGGSGSKGILPAPKAPKGRNIKYHQFLLGLRTASSKIPTTGNVKYRGSWFGYISDGETSYSTTGDKRQDKNAVAEFDVNFAEKTLKGSLKRADSQNPVFSIEANFKNGGNAFTGTATAKDLVIDGKNSQTKNTPINITTKVNGAFYGPNASELGGYFTYNGKNPTDKNSPTASSPSNSEKARAAVVFGAKKQVETNNK

SEQ ID NO: 169 - DNA, 1614 bp, Haemophilus parasuis
tgttctggcggaaaaggaagttttgatttagaagatgttcagcctaataagacaacgggcgtgtctaaagaagagtataaggatgtggaaacggataagaaagtaaaagaacagttaggggaattgatggaacctgctttggggtatgttgtaaaagttccagtgagtcaaagtggagtaaaaagaacggaaatctcaaatccagaagcaattactgatgaagatcttaataaaataccaaattacgagattatcaaaggtgtagcttatccaaatgcgggcgagctagtagataaaacagcagctgagacgatgaaatatgttcgttctggttatgtaattgatgtatatcattctggtactcgtgataaaggttatgtgttttataaaggtattactccctcaaaagaattaccgcaggggccagcccttacctaccaaggtgaatgggattttacctcagatgctaatttaaataatgaagagggaagacctacttatttaaacgacgattattatactacatggataggtaaacgggcgggcttggtttcgggagatgcgaaaccttcaaagcataaatacacaagccagtttaaagttgattttgcaactaaaaaaatgacaggtaagttatccgataaagagaaaacgatttatacagtcaatgctgatattagaggtaatcgttttacgggttctgctacagcaagtgataaagacaaagggaaaggtgcatcatataacttctttagtgtcgattctcagtctttagaaggcggcttctatggtccaaaagcggaagaaatggcaggtaaatttgtagccgacgacaaatctctttttgccgttttttcagcaaaacacaatgcttctaatgttaacaccgttcgtattattgatgcctcaaaaattgatttaactaatttcagcatttcagaacttaccaattttggcgatgcttctgttttaattattgatgggaaaaaaatggagctagctggtagcgagtttacaaataagcacactattgatatcaatggtaaaaaaatggtagctgtagcctgctgtagtaatttggaatatatgaaatttggtcaattatggcagcaaacagagggcgaaaaacaagttaaagataatagtttattcctacaaggcgaacgtactgcaacagataagatgccaaaagacggaaactataaatatattggtacttgggatgctcaggtttcaaaagaaaataattactgggttgctacggcagatgatgatagaaaagctggctaccgcacagaatttgatgttgattttggcagcaaaaatttaagtggtaagttatttgataaaaacggtgtaaatcctgtgtttaccgtaaatgcaaaaattgatggtaatggttttactggcgaagctaaaacctcagatgctggcttcgttctagatccaggtagtttacgtcatgacaatgtgaaatttagcgatgtagcagttagtggtggcttctatggtccaacggcagcagagcttggcggacaattccgttatcaatcagacaatggcagtgtaggtgtaggtgctgtctttggtgcaaaacaacaagtaaaaaaataa

SEQ ID NO: 170 - protein, 537 aa, Haemophilus parasuis
CSGGKGSFDLEDVQPNKTTGVSKEEYKDVETDKKVKEQLGELMEPALGYVVKVPVSQSGVKRTEISNPEAITDEDLNKIPNYEIIKGVAYPNAGELVDKTAAETMKYVRSGYVIDVYHSGTRDKGYVFYKGITPSKELPQGPALTYQGEWDFTSDANLNNEEGRPTYLNDDYYTTWIGKRAGLVSGDAKPSKHKYTSQFKVDFATKKMTGKLSDKEKTIYTVNADIRGNRFTGSATASDKDKGKGASYNFFSVDSQSLEGGFYGPKAEEMAGKFVADDKSLFAVFSAKHNASNVNTVRIIDASKIDLTNFSISELTNFGDASVLIIDGKKMELAGSEFTNKHTIDINGKKMVAVACCSNLEYMKFGQLWQQTEGEKQVKDNSLFLQGERTATDKMPKDGNYKYIGTWDAQVSKENNYWVATADDDRKAGYRTEFDVDFGSKNLSGKLFDKNGVNPVFTVNAKIDGNGFTGEAKTSDAGFVLDPGSLRHDNVKFSDVAVSGGFYGPTAAELGGQFRYQSDNGSVGVGAVFGAKQQVKK

SEQ ID NO: 171 - DNA, 1614 bp, Haemophilus parasuis
tgttctggcggaaaaggaagttttgatttagaagatgttcagcctaataagacaacgggcgtgtctaaagaagagtataaggatgtggaaacggataagaaagtaaaagaacagttaggggaattgatggaacctgctttggggtatgttgtaaaagttccagtgagtcaaagtggagtaaaaagaacggaaatctcaaatccagaagcaattactgatgaagatcttaataaaataccaaattacgagattatcaaaggtgtagcttatccaaattatggcgagctagtagataaaacagcagctgagacgatgaaatatgttcgttctggttatgtaattgatgtatatcattctggtactcgtgataaaggttatgtgttttataaaggtattactccctcaaaagaattaccgcaggggccagcccttacctaccaaggtgaatgggattttacctcagatgctaatttaaataatgaagagggaagacctacttatttaaacgacgattattatactacatggataggtaaacgggcgggcttggtttcgggagatgcgaaaccttcaaagcataaatacacaagccagtttaaagttgattttgcaactaaaaaaatgacaggtaagttatccgataaagagaaaacgatttatacagtcaatgctgatattagaggtaatcgttttacgggttctgctacagcaagtgataaagacaaagggaaaggtgcatcatataacttctttagtgtcgattctcagtctttagaaggcggcttctatggtccaaaagcggaagaaatggcaggtaaatttgtagccgacgacaaatctctttttgccgttttttcagcaaaacacaatgcttctaatgttaacaccgttcgtattattgatgcctcaaaaattgatttaactaatttcagcatttcagaacttaccaattttggcgatgcttctgttttaattattgatgggaaaaaaatggagctagctggtagcgagtttacaaataagcacactattgatatcaatggtaaaaaaatggtagctgtagcctgctgtagtaatttggaatatatgaaatttggtcaattatggcagcaaacagagggcgaaaaacaagttaaagataatagtttattcctacaaggcgaacgtactgcaacagataagatgccaaaagacggaaactataaatatattggtacttgggatgctcaggtttcaaaagaaaataattactgggttgctacggcagatgatgatagaaaagctggctaccgcacagaatttgatgttgattttggcagcaaaaatttaagtggtaagttatttgataaaaacggtgtaaatcctgtgtttaccgtaaatgcaaaaattgatggtaatggttttactggcgaagctaaaacctcagatgctggcttcgttctagatccaggtagtttacgtcatgacaatgtgaaatttagcgatgtagcagttagtggtggcttctatggtccaacggcagcagagcttggcggacaattccgttatcaatcagacaatggcagtgtaggtgtaggtgctgtctttggtgcaaaacaacaagtaaaaaaataa

SEQ ID NO: 172 - protein, 537 aa, Haemophilus parasuis
CSGGKGSFDLEDVQPNKTTGVSKEEYKDVETDKKVKEQLGELMEPALGYVVKVPVSQSGVKRTEISNPEAITDEDLNKIPNYEIIKGVAYPNYGELVDKTAAETMKYVRSGYVIDVAHSGTRDKGYVFYKGITPSKELPQGPALTYQGEWDFTSDANLNNEEGRPTYLNDDYYTTWIGKRAGLVSGDAKPSKHKYTSQFKVDFATKKMTGKLSDKEKTIYTVNADIRGNRFTGSATASDKDKGKGASYNFFSVDSQSLEGGFYGPKAEEMAGKFVADDKSLFAVFSAKHNASNVNTVRIIDASKIDLTNFSISELTNFGDASVLIIDGKKMELAGSEFTNKHTIDINGKKMVAVACCSNLEYMKFGQLWQQTEGEKQVKDNSLFLQGERTATDKMPKDGNYKYIGTWDAQVSKENNYWVATADDDRKAGYRTEFDVDFGSKNLSGKLFDKNGVNPVFTVNAKIDGNGFTGEAKTSDAGFVLDPGSLRHDNVKFSDVAVSGGFYGPTAAELGGQFRYQSDNGSVGVGAVFGAKQQVKK

SEQ ID NO: 173 - DNA, 1614 bp, Haemophilus parasuis; identical to SEQ ID NO: 171

SEQ ID NO: 174 - protein, 537 aa, Haemophilus parasuis
CSGGKGSFDLEDVQPNKTTGVSKEEYKDVETDKKVKEQLGELMEPALGYVVKVPVSQSGVKRTEISNPEAITDEDLNKIPNYEIIKGVAYPNYGELVDKTAAETMKYVRSGYVIDVYHSGTRDKGYVFYKGITPSKELPQGPALTYQGEWDFTSDANLNNEEGRPTALNDDYYTTWIGKRAGLVSGDAKPSKHKYTSQFKVDFATKKMTGKLSDKEKTIYTVNADIRGNRFTGSATASDKDKGKGASYNFFSVDSQSLEGGFYGPKAEEMAGKFVADDKSLFAVFSAKHNASNVNTVRIIDASKIDLTNFSISELTNFGDASVLIIDGKKMELAGSEFTNKHTIDINGKKMVAVACCSNLEYMKFGQLWQQTEGEKQVKDNSLFLQGERTATDKMPKDGNYKYIGTWDAQVSKENNYWVATADDDRKAGYRTEFDVDFGSKNLSGKLFDKNGVNPVFTVNAKIDGNGFTGEAKTSDAGFVLDPGSLRHDNVKFSDVAVSGGFYGPTAAELGGQFRYQSDNGSVGVGAVFGAKQQVKK

SEQ ID NO: 175 - DNA, 1614 bp, Haemophilus parasuis; identical to SEQ ID NO: 171

SEQ ID NO: 176 - protein, 537 aa, Haemophilus parasuis
CSGGKGSFDLEDVQPNKTTGVSKEEYKDVETDKKVKEQLGELMEPALGYVVKVPVSQSGVKRTEISNPEAITDEDLNKIPNYEIIKGVAYPNAGELVDKTAAETMKYVRSGYVIDVYHSGTRDKGYVFYKGITPSKELPQGPALTYQGEWDFTSDANLNNEEGRPTYLNDDYYTTAIGKRAGLVSGDAKPSKHKYTSQFKVDFATKKMTGKLSDKEKTIYTVNADIRGNRFTGSATASDKDKGKGASYNFFSVDSQSLEGGFYGPKAEEMAGKFVADDKSLFAVFSAKHNASNVNTVRIIDASKIDLTNFSISELTNFGDASVLIIDGKKMELAGSEFTNKHTIDINGKKMVAVACCSNLEYMKFGQLWQQTEGEKQVKDNSLFLQGERTATDKMPKDGNYKYIGTWDAQVSKENNYWVATADDDRKAGYRTEFDVDFGSKNLSGKLFDKNGVNPVFTVNAKIDGNGFTGEAKTSDAGFVLDPGSLRHDNVKFSDVAVSGGFYGPTAAELGGQFRYQSDNGSVGVGAVFGAKQQVKK

SEQ ID NO: 177 - protein, 670 aa, Neisseria meningitidis
CLGGGGSFDLDSVDTEAPRPAPKYQDVSSEKPQAQKDQGGYGFAMRLKRRNWYRQANPKEDEIKLSENDWEQTDNGDIKNPSKQKNIINALTGNNGGASLQDSSQENQGISKVTGHHNFQYVWSGFFYKQIGSTFERKDSSITAARSGPDGYIFYKGKDPSRKLPVSGEVMYKGTWDFLTDVKTSQKFTDLGNTSTRPGDRYSAFSGELDYIVNKDSDKKDEHVGWGLTTEITVDFEKKTLSGKLIKNNRVNNDNDKHTTQYYSLDATLRGNRFSGKAEATDKPKNDGETKEHPFVSDSSSLSGGFFGPKGEELGFRFLSDDQKVAVVGSAKTQDKPRNGAVASGGAGAAASNGAAGTSSENSKLTTVLDAVELTLNDKKIKNLDNFSNAAQLVVDGIMIPLLPEASESGKNQANQGTNGGTAFTRKFNHTPKSDEKDTQAGTAENGNPAASNTAGDANGKTKTYEVEVCCSNLNYLKYGMLTRKNSKSAMQAGESSSQADAKTEQVGQSMFLQGERTDEKEIPNDQNVVYRGSWYGHIANGTSWSGNASDKEGGNRADFTVNFGTKKINGTLTADNRQAATFTIVGDIEGNGFSGTAKTADSGFDLDQSNNTRTPKAYITNAKVQGGFYGPKAEELGGWFAYSDDKQTKNATDASGNGNSASSATVVFG

SEQ ID NO: 178 - protein, 680 aa, Neisseria meningitidis
CLGGGGGSFDLDSVDTEAPRPAPKYQDVSSEKPQAPKDQGGYGFAMRFKRRNWYPSAKENEVKLNEGDWEATGLPTEPKELPKRQKSVIEKVETDDDSNIYSSPYLTPSNHQSGSAGNGVNQPKNKATDHENFQYVYSGWFYKHAKQHRDLANKIVQQGDDGYIFYHGKEPSRQLPASGKITYKGVWHFATDVKKSQNFREIIQPSKSQGDRYSGFSGDDGEEYSNKNETTLQSGHEGYGFTSNLEVDFDNKKLTGKLIRNNANTSNNQATTQYYSLDAQITGNRFNGKAMATDKPGTGETKLHPFVSDSSSLSGGFFGPKGEELGFRFLSDDQKVAVVGSAKTQDKPGNGAAASGGTGAAASGGAADMPSENSKLTTVLDAVELTHGGTAIKNLDNFSNAAQLVVDGIMIPLLPEASESGHNQANQGTNGGTAFTRKFNHTPTSDEKDTQAGTAANGNQAASNTAGDANGKTKTYAVEVCCSNLNYLKYGLLTRKTAGNTGEGGNGSQTAAQTDAQSMFLQGERTDENKIPTDQNVVYRGSWYGHIANGTSWSGNASDKEGGNRAEFTVNFGEKKINGTLTAENRQAATFTIEGDIKDNGFEGTAKTADLGFDLDQSNTTGTPKAYITNAKVQGGFYGPKADELGGWFAYPGDNQAQPSASGSGASAANSATVVFGAKR

SEQ ID NO: 179 - protein, 340 aa, Neisseria meningitidis
TQDKPRNGAVASGGAGAAASNGAAGTSSENSKLTTVLDAVELTLNDKKIKNLDNFSNAAQLVVDGIMIPLLPEASESGKNQANQGTNGGTAFTRKFNHTPKSDEKDTQAGTAENGNPAASNTAGDANGKTKTYEVEVCCSNLNYLKYGMLTRKNSKSAMQAGESSSQADAKTEQVGQSMFLQGERTDEKEIPNDQNVVYRGSWYGHIANGTSWSGNASDKEGGNRADFTVNFGTKKINGTLTADNRQAATFTIVGDIEGNGFSGTAKTADSGFDLDQSNNTRTPKAYITNAKVQGGFYGPKAEELGGWFAYSDDKQTKNATDASGNGNSASSATVVFGAK

SEQ ID NO: 180 - protein, 330 aa, Neisseria meningitidis
TQDKPGNGAAASGGTGAAASGGAADMPSENSKLTTVLDAVELTHGGTAIKNLDNFSNAAQLVVDGIMIPLLPEASESGHNQANQGTNGGTAFTRKFNHTPTSDEKDTQAGTAANGNQAASNTAGDANGKTKTYAVEVCCSNLNYLKYGLLTRKTAGNTGEGGNGSQTAAQTDAQSMFLQGERTDENKIPTDQNVVYRGSWYGHIANGTSWSGNASDKEGGNRAEFTVNFGEKKINGTLTAENRQAATFTIEGDIKDNGFEGTAKTADLGFDLDQSNTTGTPKAYITNAKVQGGFYGPKADELGGWFAYPGDNQAQPSASGSGASAANSAT

SEQ ID NO: 181 - protein, 340 aa, Neisseria meningitidis
TKDKAESGNGNGNGTSGGASVSASNGAAGTSSENSKLTTVLDAVELKSGDKEVKKLDNFSNAAQLVVDGIMIPLLPEASESGSNQANQGTNGGTAFTRKFNHTPKSDEKDTQAGTAENGNPAASNTAGDANGKTKTYEVEVCCSNLNYLKYGMLTRKNSKSAMQAGESSSQADAKTEQVEQSMFLQGERTDEKEIPNDQNVVYRGSWYGHIANGTSWSGNASDKEGGNRADFTVNFGTKKINGTLTADNRQAATFTIVGDIEGNGFSGTAKTADSGFDLDQSNNTRTPKAYITNAKVQGGFYGPKAEELGGWFAYSDDKQTKNATDASGNGNSASSATVV

SEQ ID NO: 182 - protein, 330 aa, Neisseria meningitidis
TKDKPGNGAAAPGGTDAAASNGAAGTSSENSKLTTVLDAVELKSGGKEVKNLDNFSNAAQLVVDGIMIPLLPKDSESGNTQADKGKNGGTEFTRKFEHTPESDKKDAQAGTAENGNPAASNTAGDTNGKTKTYAVEVCCSNLNYLKYGLLTRKTAGNTGEGGNGAAQTDAQSMFLQGERTDEKEIPNDQNIVYRGSWYGHIANGTSWSGNASDKEGGNRAEFTVNFADKKLNGTLTAGERTSPTFTITATIQGNGFEGTAKTGDDGFALDTKNTVDTHKAHITDANVQGGFYGPKAEELGGWFAYPGDRQAQPSASGSGTSAANSATVVF

SEQ ID NO: 183 - protein, 320 aa, Neisseria meningitidis
TKDKPANGNTAAASGGTDAAASGGTAGTPSESTKLTTVLDAVELKSGDKEVKKLDNFSNAAQLVVDGIMIPLLPEASESGNNQANQGTNGGTAFTRKFNHTPKSDEKDTQAGTAENGNPAASNTAGDANGKTKTYEVEVCCSNLNYLKYGLLTRKTAGNTGEGGNGSPTAAQTDAQSMFLQGERTDEKEIPKEQQDIVYRGSWYGHIANGTSWSGNASDKEGGNRAEFTVNFGDKKITGTLTADNRQAATFTIEGDIEGNGFSGTAKTDNLGFDLDQSDNTRTPKAYITDAKVQGGFYGPKAEELGGWFAYPGDKQTEKA

SEQ ID NO: 184 - protein, 350 aa, Neisseria meningitidis
TQDKAANGNTAAASGGTDAAASNGAAGTSSENSKLTTVLDAVELTLNDKKIKNLDNFSNAAQLVVDGIMIPLLPETSESGSNQADKGKKGKNGKNGGTDFTYKTTYTPKNDDKDTKAQTGAAGSSGAQTDLGKADVNGGKAETKTYEVEVCCSNLNYLKYGMLTRKNSKSAMQAGGNSSQADAKTEQVEQSMFLQGERTDEKEIPNDQNVVYRGSWYGHIASSTSWSGNASNATSGNRAEFTVNFDTKKINGTLTAENRQEATFTIDGKIEGNGFSGTAKTADLGFDLDQSNTTGTPKAYITDAKVQGGFYGPKAEELGGWFAYPGDKQTEKATVASGDGNSASSATVVF

SEQ ID NO: 185 - protein, 340 aa, Neisseria meningitidis
TKDKPANGNTAAASGGTDAAASNGAAGTSSENGKLTTVLDAVELKLGDKEVQKLDNFSNAAQLVVDGIMIPLLPEASESGNNQANQGTNGGTAFTRKFDHTPESDKKDAQAGTQTNGAQTASNTAGDTNGKTKTYEVEVCCSNLNYLKYGMLTRKNSKSAMQAGESSSQADAKTEQVEQSMFLQGERTDEKEIPSEQNIVYRGSWYGYIANDKSTSWSGNASNATSGNRAEFTVNFADKKITGTLTADNRQEATFTIDGNIKDNGFEGTAKTAESGFDLDQSNTTRTPKAYITDAKVQGGFYGPKAEELGGWFAYPGDKQTKNATNASGNSSATVVFGAK

SEQ ID NO: 186 - protein, 340 aa, Neisseria meningitidis
TKDKPANGNTAAASGGTDAAASNGAAGTSSENGKLTTVLDAVELKLGDKEVQKLDNFSNAAQLVVDGIMIPLLPEASESGNNQANQGTNGGTAFTRKFDHTPESDKKDAQAGTQTNGAQTASNTAGDTNGKTKTYEVEVCCSNLNYLKYGMLTRKNSKSAMQAGESSSQADAKTEQVEQSMFLQGERTDEKEIPSEQNVVYRGSWYGHIANGTSWSGNASDKEGGNRAEFTVDFGAKKINGKLTAENRQAATFTIEGDIEGNGFSGTAKTAESGFDLDQSNTTRTPKAYITDAKVQGGFYGPKAEELGGWFAYPGDKQTKNATNASGNSSATVVFGAKRQ

SEQ ID NO: 187 - protein, 340 aa, Neisseria meningitidis
TKDKAESGKTVAASGGTGAAASGGAADMPSENGKLTTVLDAVELTLNDKKIKNLDNFSNAAQLVVDGIMIPLLPKDSESGNNQANQGTNGGTAFTYKTTYTPKSDEKDTQAGTAANGNQAASNTAGDTNGKTKTYEVEVCCSNLNYLKYGMLTRKNSKSAMQAGENGSQADAKTEQVEQSMFLQGERTDEKEIPKEQQDIVYRGSWYGHIAGSTSWSGNASNATSGNRAEFTVNFDTKKINGKLTAENRQAATFTIVGDIKDNGFEGTAKTDNLGFDLDQSNTTGTPKAYITNAKVQGGFYGPKAEELGGWFAYSDDKQTKNATDASGNGNSASSATVVF

SEQ ID NO: 188 - protein, 330 aa, Neisseria meningitidis
TKDKNANGNTPAASSGAGAATMPSETRLTTVLDAVELKSGGKEVQKLDNFSNAAQLVVDGIMIPLLPEASESGKNQADKGKNGGTAFTYTITYTPESDKKDTQAGTPTNGAQTASNTAGDTNGKTKTYEVEVCCSNLNYLKYGMLTRKNSKSAMQAGESSSQADAKTEQVEQSMFLQGERTDEKEIPSEQNIVYRGSWYGYIANDKSTSWSGNASNATSGNRAEFTVNFADKKITGTLTADNRQEATFTIDGNIKDNGFEGTAKTAESGFDLDQSNTTRTPKAYITDAKVQGGFYGPKAEELGGWFAYPGDKQTKNATNASGNSSATVVF

SEQ ID NO: 189 - protein, 340 aa, Neisseria meningitidis
TKDKLENGAAASGSTGAAASGGAADMPSENGKLTTVLDAVELKSGGKEVKNLDNFSNAAQLVVDGIMIPLLPKESESESNQADKGKNGGTAFTRKFEHTPESDKKDTQAGTAENGNPAASNTAGDTNGKTKTYEVEVCCSNLNYLKYGMLTRKNSKSAMQAGENGSQADAKTEQVEQSMFLQGERTDEKEIPKEQQDIVYRGSWYGHIANDTSWSGNASDREGGNRADFTVNFGTKKINGTLTAENRQEATFTIVGDIKDNGFEGTAKTADSGFDLDQSNTTRTPKAYITDAKVKGGFYGPKAEELGGWFAYPGDKQTEKATVTSGDGNSASSATVVFGA

SEQ ID NO: 190 - protein, 340 aa, Neisseria meningitidis
TQDKAANGNTAAASGDASVSASNGAAGTSSENGKLTTVLDAVELTLNDKKIKNLDNFSNAAQLVVDGIMIPLLPETSESGNNQADKGKNGGTAFTRKFDHTPKSDEKDTQAGTAANGAQTASGTAGDTSGKTKTYQVEVCCSNLNYLKYGMLTRKNSESAMQAGESSSQTPAAQTAQGAQSMFLQGERTDENKIPTDQNVVYRGSWYGHIASSTSWSGNASNATSGNRAEFTVNFDTKKITGKLTAENRQEATFTIDGKIEGNGFEGTAKTAELGFDLDQSNTTGTPKAYITNAKVQGGFYGPKAEELGGWFAYPGDKQTENTTVASGNGNSASSATVVF

SEQ ID NO: 191 - protein, 340 aa, Neisseria meningitidis
TKDKPANGNTAEASGGTGAAASDGAAGTSSKNGKLTTVLDAVELKLGDKEVQKLDNFSNAAQLVVDGIMIPLLPEASESGNTNQGTNGGTAFTRKFEQMPESDEKDTKAQTGTGGTQTASNTAGDTNGKTKTYEVEVCCSNLNYLKYGMLTRKNSKSAMQAGESSSQADAKTEQVGQSMFLQGERTDEKEIPNDQNVVYRGSWYGHIANGTSWSGNASDKEGGNRADFTVNFGTKKINGTLTADNRQAATFTIVGDIEGNGFSGTAKTADSGFDLDQSNNTRTPKAYITNAKVQGGFYGPKAEELGGWFAYSDDKQTKNATDASGNGNSASSATVVFGAK

SEQ ID NO: 192 - protein, 340 aa, Neisseria meningitidis; identical to SEQ ID NO: 179

SEQ ID NO: 193 - protein, 340 aa, Neisseria meningitidis
TKDKPANGNTAEASGGTDAAASGGAAGTSSENSKLTTVLDAVELTHGGTAIKNLDNFSNAAQLVVDGIMIPLLPQNSTGKNNQPDQGKNGGTAFIYKTTYTPKNDDKDTKAQTVTGGTQTASNTAGDANGKTKTYEVEVCCSNLNYLKYGLLTRKTAGNTVGSGNSSPTAAAQTDAQSMFLQGERTDENKIPSEQNVVYRGSWYGHIASSTSWSGNASDKEGGNRAEFTVNFGEKKITGTLTAENRQEATFTIDGKIEGNGFSGTAKTAELGFDLDQKNTTRTPKAYITDAKVKGGFYGPKAEELGGWFAYSDDKQTKNATDASGNGNSASSATVVFGAK

SEQ ID NO: 194 - protein, 340 aa, Neisseria meningitidis
TKDKTENGAAASGGAGAAASGGAAAMPSENGKLTTVLDAVELTHGGTAIKNLDNFSNAAQLVVDGIMIPLLPEASESGHNQANQGTNGGTAFTRKFDHTPESDKKDAQAGTQTNGAQTASNTAGDTNGKTKTYEVEVCCSNLNYLKYGMLTRKNSKSAMQAGENGSQADAKTEQVEQSMFLQGERTDEKEIPKEQQDIVYRGSWYGHIANDTSWSGNASDREGGNRADFTVNFGTKKINGTLTAENRQEATFTIVGDIKDNGFEGTAKTADSGFDLDQSNTTRTPKAYITDAKVKGGFYGPKAEELGGWFAYPGDKQTEKATVTSGDGNSASSATVVFGA

SEQ ID NO: 195 - protein, 340 aa, Neisseria meningitidis
TKDKPRNGAVASGGAGAAASNGAAGTSSENSKLTTVLDAVELTLNDKKIKNLDNFSNAAQLVVDGIMIPLLPQNSTGENNQPDQGKTGGTAFIYKTTYTPKNDDKDTKAQTGAAGSSGAQTASGTESVTGGQAGTKTYEVEVCCSNLNYLKYGLLTRKTASNTGEGGNGSQTAAQTAQGAQSMFLQGERTDEKEIPNDQNVVYRGSWYGYIANDTSWSGNASDKEGGNRAEFTVNFGEKKINGKLTAENRQEATFTIEGMIQGNGFEGTAKTADLGFDLDQSNTTGTPKAYITNAKVQGGFYGPKAEELGGWFAYPGDKQTENTTVASGNGNSASSATVV

SEQ ID NO: 196 - protein, 620 aa, Haemophilus influenzae
CSGGGSFDVDNVSNTPSSKPRYQDDTSSSRTKSKLEKLSIPSLGGGMKLVALNLFDRNKPSLLNEDSYMIFSSRSTIEEDVKNNNQNGEHPIDSIVDPRAPNSNENRHGQKYVYSGLYYIQSWSLRDLPNKKFYSGYYGYAYYFGNTTASALPVGGVATYKGTWSFITAAENGKNYELLRNSGGGQAYSRRSATPEDIDLDRKTGLTSEFTVNFGTKKLTGGLYYNLRETDANKSQNRTHKLYDLEADVHSNRFRGKVKPTKKESSEEHPFTSEGTLEGGFYGPEGQELGGKFLAHDKKVFGVFSAKEQQETSENKKLPKETLIDGKLTTFKTTNATANATTDATTSTTASTKTDTTTNATANTENFTTKDIPSFGEADYLLIDNYPVPLFPESGDFISSKHHTVGKKTYQVEACCSNLSYVKFGMYYEAPPKEEEKEKDKDKDKDKEKEKQATTSIKTYYQFLLGLRTPSSEIPKEGSAKYHGNWFGYISDGETSYSASGDKERSKNAVAEFNVNFAEKTLTGELKRHDTQNPVFKINATFQSGKNDFTGTATAKDLAIDGKNTQGTSKVNFTATVNGAFYGPHATELGGYFTYNGNNPTDKNSSSNSEKARAAVVLEL

SEQ ID NO: 197 - protein, 630 aa, Haemophilus influenzae
CSGGGGSFDVDDVSNPSSSKPRYQDDTSSSRTKSKLENLSIPSLGGGMKLVAQNLRDRTKPSLLNEDDYMIFSSLSTIKADVEKENKHYTSPVGSIDEPSTTNPKENDHGQRYVYSGLYYIPSWNLNDLKNNKYYYSGYYGYAYYFGKQTATTLPVNGKVTYKGTWSFITAAENGKRYPLLSNGSQAYFRRSAIPEDIDLEVKNDENREKGLVSEFSADFGTKKLTGGLFYTKRQTHIQNHEKKKLYDIDAHIYSNRFRGKVNPTQKDSKEHPFTSEGTLEGGFYGPEGQELGGKFLAGDKKVFGVFSAKGTEENKKLPKETLIDGKLTTFSTKTTDAKTNATANATTSTAANTTTDTTANTITDAENFKTKDISSFGEADYLLIDNYPVPLLPESGDFISSKHHTVGKKTYQVKACCSNLSYVKFGMYYEVPPKEEEKDKEKKEKEKEKQATNLSNTYYQFLLGLRTPSSEIPKGGSAKYLGSWFGYLSDGSTSYSPSGDKKRENNALAEFNVNFVDKTLKGQLIRHDNQNTVFTIDATFKGGKNNFTGTATANNVAIDPQSTQGTSNVNFTATVNGAFYGPNATELGGYFTYNGNPTDKSSSTVPSSSNSKNARAAVVFGARQQVETT

SEQ ID NO: 198 - protein, 599 aa, Haemophilus influenzae
CSGGGGSFDVDDVSNPSSSKPRYQDDTSNQRKKSNLEKLSIPSLGGGMKLVAQNLRGREPSLLNEDGYIIFSSLSKIEDDFKKENQSQEPTIGSIDEPSETNSPQNHHGQQYVYSGLYYIQSWRNFSNGKFYSGYYGYAYYFGKQTATTLPVNGEATYKGTWSFITATERGKNYSLFSNSSGQGYSRRSAISEDIDLENDQNNGETGLISQFSADFGTKKLKGELFYTKRKTNNQNYEKKKLYDIDANIYSNRFRGKVKPTEKDSEEHPFTREGTLEGGFYGPNGEELGGKLAGDKKVFGVFSAKETEETKQKTLPKETLIDGKLTTFSTKKPDATTSTTANAKTDATTNAENFTTKDISSFGEADYLLIDNYPVPLLPETENSGDFATSKHYEVRDKTYKVEACCKNLSYVKFGMYYEDNKKNNKNETEQYHQFLLGLRTASSKIPTTGNVKYRGSWFGYISDGETSYSTTGDKRQDKNAVAEFDVNFAEKTLKGSLKRADSQNPVFSIEANFKNGGNAFTGTATAKDLVIDGKNSQTKNTPINITTKVNGAFYGPNASELGGYFTYNGKNPTDKNSPTASSPSNSEKARAAVVFGAK

SEQ ID NO: 199 - protein, 630 aa, Haemophilus influenzae
CSGGGGSFDVDDVSNPSSSKPRYQDDTSSSRKKSDLEKLSIPSLGGGMKLVAQNLRGSEPSLLNEDGYMIFSSLSTIEEDVKKVKKEKNVDTNPIGSIDEPSASATNPPQNHHGQKYVYSGLYYIPSWNLIDSTKNKYYFGYYGYAYYFGKETATTLPVNGKVTYKGTWSFITATEKGKRYELFRRLGSPYYRRSAISEDIDDIENHPSNGDAGLISEFSVDFGEKKLTGELYYNKRKTNVNPSANTKHTLYNLEAKVYSNRFRGNVTPKEPDSKDHPFTSKGTLEGGFYGPKGEELGGKFLAGDKKVFGVFSAKETQKTKIIQRNLIDGKLTTFSTKTTNGTTITTTTNAITDATANTKTDATANTKTDAKTDAKTDAENFTTKDISSFGEADYLLIDKYPIPLLPEKNTDDFISSRHHDVGGKTYKVEACCKNLSYVKFGMYYEDKEKKNTNQTGQYHQFLLGLRTPSSQIPVTGNVKYLGSWFGYIGDDKTSYSTTGNKQQDKNAPAEFDVNFDNKTLTGKLKRADSQNTVFNIEATFKNGSNAFEGKATANVVIDPKNTQATSKVNFTTTVNGAFYGPHATELGGYFTYNGNNPTATNSESSSTVPSPPNSPNARAAVVFGAKRQV

SEQ ID NO: 200 - protein, 610 aa, Haemophilus influenzae
CSGGGGSFDVDDVSNPSSSKPRYQDDTLNQRKKSNLQKLSIPSLGGGMKLVAQNFAGAKEPSFLNENDYISYFSSLSTIKDDVENNNKNKDTPIGSIDEPRAPNSNENHQNHHGQQYVYSGLYYIPSWRLINLPNKFYSGYYGYAYYFGKQTATTLPVDGVATYKGTWSFITATERGKNYSLFNNRGQAYSRRSATPGDIDLENGDAGLTSEFTVNFGTKKLTGELYYNERETNLNQSKDRKHKLYDLEADVYSNRFRGTVKPTKKESSEEHPFTSEGTLEGGFYGPNGEELGGKFLAGDNRVFGVFSAKEQQETEENKKLLKETLIDGKLTTFSTKKTDTTTSTTTNTAASTTTDEKTNAKNFTTEDISSFGEADYLLIDNYPVPLLPETENSGDFISSRHHDVGGGKTYKVEACCKNLSYVKFGIYYEDNEKNNKNETEQYHQFLLGLRTPSSQIPATGNVKYRGSWFGYISDGKTSYSTTGDKQQDKNALAEFDVNFDTKTLTGELKRAGTQNTVFTIDATFKSGENNFTGTATANNVAIDSQNTQGTPKVNFKTTVNGAFYGPNASELGGYFTYNGKNPTATNSESSSTVPSPPNSPNARAAVVFG

SEQ ID NO: 201 - protein, 630 aa, Haemophilus influenzae
CSGGGGSFDVDDVSNPSSSKPRYQDDTSNQRTKSNLQNLSIPSLGGGMKLVAQNLLGKREPSFLNEDGYMIFSSRSTIKDDVEKVKNKNGGGGLIGSIEEPNGTPQNSNSQKYVYSGLYYIENWKDFSQLQAPEKKAYTGHYGYAYYFGNQTATTLPVNGEATYKGTWNFITATRYNKNYPLFGSGSGAYSKRSAISEDIDNLENNSTNGDKGLTSEFTVNFGTKKLTGGLYYNERETHRNQSQDRKHKLYDLEADVHSNRFRGKAKPTEKNSTDHPFTSEGTLEGGFYGPKGEELGGKFLADDNRVFGVFSAKETEETEKKNLSKETLIDGKLITFSTKKTDATANATTNTTTDVKNNATTDTTANAENFTTKDISSFGEADYLLIDNYPVPLLPENTNDFISSKHHEVGGKRYKVEACCKNLSYVKFGMYYEDKENNKNETDKEKEKQTTTSIKTYYQFLLGLRTPSSEIPKMGNVTYRGSWFGYIGDDKTSYSATGDKRQDKNAPAEFNVDFNNKKLTGTLKRHDNQNPVFKINATFQNGRNDFEGTATAENFVIDGKDSQGNTPINITTKVNGAFYGPNATELGGYFTYNGNPTATNSESSSTVPSPPNSPNARAAVVFGAKKQVE

SEQ ID NO: 202 - protein, 620 aa, Haemophilus influenzae
CSGGGGSFDVDDVSNPSSSKPRYQDDTSNQRKKSDLQKLSIPSLGGGMKLVAQNFIGAKEPSFLNENGYMIFSSLSTIKDDVENVKNNNQNGGSLIGSIEEPNGTSQDSNSQQYVYSGLYYIDSWRDHKKQENKAYAGYYGYAFYYGNKTATDLPVKGIAKYKGTWNFITATENGKRYSLFSNNSQAYSRRSATRGDIDLENDPKNEREKGLVSEFSVDFDKKELTGGLYYNERETDRNKSKDRKHKLYNLKAKVYSNRFRGNVIPEEPTSTDHPFTSDGTLEGGFYGPNGEELGGKFLAGDNRVFGVFSAKENPENKTLSRETLIDGKLITFSTKKTDAKTNATTSTAANTTTDTTANTITDEKNFKTEDISSFGEADYLLIDKYPIPLLPDKNTNDFISSKHHTVGNKRYKVEACCSNLSYVKFGMYYEAPPKEEEKEKEKDKEKKEKQTTTTSINTYYQFLLGHRTPKDDIPKTGSAQYRGNWFGYIGDDKTSYSATGGKNAVAEFDVNFADKTLKGVLKRHDTQNPVFNIEADFKNGRNDFTGKATANVVIDPQNTQATSKVNFTATVNGAFYGPNATELGGYFTYNGNPTDKSSSTVPSPPNSPNARAAVVFGAK

SEQ ID NO: 203 - protein, 610 aa, Haemophilus influenzae
CSGGGGSFDVDDVSNPSSSKPRYQDDTSSSRTKSKLENLSIPSLGGGMKLVAQNLRGNKEPSLLNEDGYIPYFSSLSTIKADVEKENKHGTSPVGSIDEPSTTNPPEKHHGQKYVYSGLYYIQSWNNLSNGKFYSGYYGYAFYYGNKTATNLPVSGVAKYKGTWNFITATENGKTYSLLRNNGGQAYAKRSAIPEDIDLDSKTGLISEFSVDFGTKKLTGELYYNKRKTNLINESQDRKHKLYTLEADVHSNRFRGKAKPPEKDSSDHPFTSEGTLEGGFYGPDGEELGGKFLAGDKKVFGVFSAKETEETPEKKLSRETLIDGKLITFKRTDATTNATASTTTNTAANTAANTKTNEKNFTTEDISSFGEADYLLIDNYPIPLFPENTSDFATSKHHNIGNKTYKVEACCKNLSYVKFGIYYEDKPIKEEEKDKEKQTTATTNTYYQFLLGHRTANAEIPKKGSAKYHGSWFGYITDGKTSYSTTGAKQRDNSGVSDFDVNFDNKKLTGTLKRHDTGNTVFSIEANLKNGGNDFTGTATANNVAIDSQNTQANTSRVNFTATVKGAFYGPNASELGGYFTYNGKNPTDKNSSAVSSSSNSENARAAVVL

SEQ ID NO: 204 - protein, 640 aa, Haemophilus influenzae
CSGGGSFDVDNVSNTPSSKPRYQDDTSNQRKKSNLKKLFIPSLGGGMKLVAQNLRGNKEPSFLNEDDYISYFSSLSTIEKDVKDNNKNGADLIGSIDEPSTTNPPEKHHGQKYVYSGLYYTPSWSLNDSKNKFYLGYYGYAFYYGNKTATNLPVNGVAKYKGTWDFITATKNGKRYPLLSNGSHAYYRRSAIPEDIDLENDSKNGDIGLISEFSADFGTKKLTGQLSYTKRKTNNQPYEKKKLYDIDADIYSNRFRGTVKPTEKDSEEHPFTSEGTLEGGFYGPNAEELGGKFLATDNRVFGVFSAKETEETKKEALSKETLIDGKLITFSTKKTDAKTNATTSTAANTTTDTTANTITDEKNFKTEDISSFGEADYLLIDKYPIPLLPDKNTNDFISSKHHTVGNKRYKVEACCSNLSYVKFGMYYEDPLKEKETETETETEKDKEKEKEKDKDKEKQTAATTNTYYQFLLGHRTPKDDIPKTGSAKYHGSWFGYITDGKTSYSPSGDKKRDKNAVAEFNVDFAEKKLTGELKRHDTGNPVFSIEANFNNSSNAFTGTATATNFVIDGKNSQNKNTPINITTKVNGAFYGPKASELGGYFTYNGNSTATNSESSSTVSSSSNSKNARAAVVFGARQQVE

SEQ ID NO: 205 - protein, 91 aa, Artificial Sequence
  Synthetic
ETKRPAAKPKAQKKKRKKKKTGVKSVKKGKKKIKKKKGTKKAAVKKKGSKKKAVKGKKKAKKPKKKSPTKKGGSGSKGILPAPKAPKGRNI

SEQ ID NO: 206 - protein, 519 aa, Mannheimia haemolytica
TVSASETEALLQPGFGFSAKIPRRNLLPQGKEDVAPIGDIKEITGDLPKIPYEEEVKACGSSADGFSHTHDRNHKLYTRDFNFVRSGYVVHSGPKPEIKPKEILRTGAHGYVYYLGIEPPKAIPTQKLTYKGYWDFTTYAAKGRDSNIFLIPAGINSGAIPENSHDINVDDSEKPMGHTGEFTADFANKTLTGTLVRNGYVSRSKEQKITTIYDIDAKIKGNRFSGKANPKKPMILIFGKSSTTLEGGFFGGEAQELAGKFLADDKSVFVVFAGTRDAKKDDSESAFDAFPIKLKDLNKSEMDTFGNATHLIINNKQIPLIAEATKSFAEMKFDTYRVSVCCNNLDYVKFGIYSEGNNSDTALQEYLVGERTALADLPTGTVKYRGTWDGVMYSKSGSAGVESPSNSESGTRSLFDVDFVNKKINGKLIANDGVEERPMLTLEGNLKGNGFGGTAKTGNSGFNLDPKSTNGGTVGHINTQFEGGFYGPKATELGGIVQNTETDKDRVSITFGGKRQIEK

SEQ ID NO: 207 - protein, 688 aa, Neisseria gonorrhoeae
CLGGGGSFDLDSVDTEAPRPAPKYQDVPSKKPEARKDQGGYGFAMRFKRRNWHPSANPKEDEVKLKNDDWEATGLPTEPKKLPLKQQSVISEVETNGNSKMYTSPYLSQDADSSHANGANQPKNEVTDYKKFKYVYSGWFYKHAKSEVKNENGLVSAKRGDDGYIFYHGDKPSRQLPASEAVTYKGVWHFVTDTKQGQKFNDILETSKGQGDKYSGFSGDEGETTSNRTDSNLNDKHEGYGFTSNFKVDFNNKKLTGKLIRNNKVINTAASDGYTTEYYSLDATLRGNRFSGKAIATDKPNTGGTKLHPFVFDSSSLSGGFFGPQGEELGFRFLSDDGKVAVVGSAKTKDSTANGNAPAASSGPGAATMPSETRLTTVLDAVELTPDGKEIKNLDNFSNATRLVVDGIMIPLLPTESGNGQADKGKNGGTDFTYETTYTPESDKKDTKAQTGAGGMQTASGTAGVNGGQVGTKTYKVQVCCSNLNYLKYGLLTRENNNSVMQAVKNSSQADAKTKQIEQSMFLQGERTDENKIPQEQGIVYLGFWYGRIANGTSWSGKASNATDGNRAKFTVNFDRKEITGTLTAENRSEATFTIDAMIEGNGFKGTAKTGNDGFAPDQNNSTVTHKVHIANAEVQGGFYGPNAEELGGWFAYPGNEQTKNATVESGNGNSASSATVVFGAKRQKLVK

SEQ ID NO: 208 - protein, 683 aa, Neisseria gonorrhoeae
CLGGGGSFDLDSVDTEAPRPAPKYQDVPSKKPEARKDQGGYGFAMRFKRRNWYPPSNPKENEIRLSEGDWEQTGNGNIKNPSKQKNIIDALSGNGEAPLQDSSQQGEGISKVTDYHDFKYVWSGFFYKQIGNTIKKDDSSSKIIEARNGPDGYIFYKGTDPSRKLPVSGSVEYKGTWDFLTDVQANQKFTDLGSAFTKSGDRYSAFSGELDYIVRKEEDKKDGHVGLGLTTEITVNFEKKTLSGKLIKNNMVINNGDEPTTQYYSLEAQVTGNRFNGKAMVTDKPENSKSKQHPFVSDSSSLSGGFFGPQGEELGFRFLSNDNKVAVVGSAKTKDETASSGGTSGGASVSASNGATGTSSGNSNLTTVLDAVELTPDGKEIKDLDNFSNAAQLVVDGIMIPLLSTESGNGQADKGKNGGTDFTYTTTYMPESDKKDTKAQTGAGGMQTASDAAGVNGGQAGTKTYKVEACCSNLNYLKYGLLTRENSNSVMQTVRNSSQAAARTAQGAQSMFLQGERTDEKEIPKEQKVVYLGTWYGHIAANGTSWTGNASDQQSGNRAKFDVNFKDKKITGTLTAANRQEATFTIDAMIDDNGFKGTAKTGNDGFAPDQNSSTGTYKVHIANAEVQGGFYGPNAEELGGWFAYPGNGQTKNAQENAQASSGNGNSAVSATVVFGAKRQQLVK

SEQ ID NO: 209 - protein, 679 aa, Neisseria gonorrhoeae
CLGGGGSFDLDSVDTEAPRAAPKYQDVPSKKPEARKDQGGYGFAMRFKRRNWYSQANLKEDKIPLSEGDWEQTDNGNIKNPSKQKNIINALSGNEEASLQDSSVQGEGISKVKDHHNFQYVWSGFFYKQISSTIKRDDSSNKIIEVRNGPDGYIFYKGKDPSRKLPASNEVTYKGTWDFLTDVKANQKFTDLANTFARPGDRYSAFSGELDYIVKKQEDKKEKHKGLGLTTEITVDFGKKTLSGKLIKNNHVINDNSDDQNKYTTEYYTLDATLRGNRFSGKAMATDKSSDGQAKQHPFVSNSSSLSGGFFGPQGKELGFRFLSDDNKVAVVGSAKTKDEATNGNTAAASSGPGAATMPSETRLTTVLDAVELTPDGKEIKDLDNFSDATRLVVDGIMIPLLPKDSESGVSQPDKGENGGTDFTYTTTYMPESDKKDTKAQTGAGGMQTASGAAGVNSGQAGTKTYKVEACCSNLNYLKYGMLTRKNSESAMQAGGSSNQADAKTEQAEQSMFLQGERTDEKQIPKDENVVYLGSWYGRIANGTSWSGNASNTTSGNKAEFTVNFDKKEITGMLTAANRPEATFTIDAMIDGNGFKGTAKTGNDGFAPDQNNSTVTHKVHIAEAKVRGGFYGPNAEELGGWFAYPGNGQAKNAQTSSGDGNSAGSATVVFGAKRQELVQ

SEQ ID NO: 210 - protein, 679 aa, Neisseria gonorrhoeae
CLGGGGSFDLDSVDTEAPRPAPKYQDVPSKKPEARKDQGGYGFAMRFKRRNWYPPSNPKENEIRLSEGDWEQTDNGNIKNPSKQKNIINALSGNGGASLQDSSQQGEGISKVTDHHDFKYVWSGFFYKQIGNTVKKSGLSITEARNGPDGYIFYKGKDPSRELPVLGSVEYKGTWDFLTDVRVNQKFTDLGSAYTRSGDRYSAFSGELDYIVKKEDDKKEKHKGLGLTTEITVDFEKKTLNGKLIKNNHVIGNVATENKYTTEYYTLDATLRGNRFSGTATATDKSSDGQAKQHPFVSDSSSLSGGFFGPKGEELGFRFLSDDQKVAVVGSAKTRDKAENGGGNGASGGASVSASNGAAGMPSENGKLTTVLDAVELESDGKKVKNLDNFSDATRLVVDGIMIPLLPTESGNGQADKGKNGGTDFTYTTTYTPESDKEDTQTGMAANGVQTVSNAAGGTSGKTKTHYEVQACCSNLNYLKYGLLTRKTAGNTGGGGNGSQAVQTAQGAQSMFLQGERTDEKEIPKDGNVVYLGTWYGHIAINGTSWTREASNQENGNRAKFDVNFKDKKITGTLTAANRQEATFTIDAMIEGNGFKGTAKTGDGGFAPDQNNSTGTHKVHIAEAKVQGGFYGPNAEELGGWFAYPGNGQAENAQTSSGNGNSAGSATVVFGAKRQELVK

SEQ ID NO: 211 - protein, 673 aa, Neisseria gonorrhoeae
CLGGGGSFDLDSVDTEAPRPAPKYKDVPSKKPEARKDQGGYGFAMRFKRRNWYPPSNPKENEIRLSEGNWEQTDDGEIKTPSKQKNIINALSGNEGVSLQDSSQQGEGISKVTDHHDFKYVWSGFFYKRIGITTKKDDLSNKIIEARNGPDGYIFYKGTDPSRKLPVSGSVEYKGTWDFLTDVKANQKFTGLGNTSTKSGDRYSAFSGELDYIVKKESDKKDGHVGLGLTTEITVDFGKKTLSGKLIKNNMVINNGDEPTTQYYSLEAQVTGNRFNGKAIATDKPKVNETKEHPFVSDSSSLSGGFFGPQGEELGFRFLSHDNKVAVVGSAKTKDKNANGNTAAAGTAGAAGMSSEDTKLTTVLDAVELTPDGKKVKNLDNFSDATQLVVDGIMIPLLPTESGNGQADKGENGKTAFIYETTYTPESDKKDTQTGMATNGVQTVSNTAGGTSGKTKTHYKVQACCSNLNYLKYGLLTRENSNSVMQTVRNSSQAAARTEQGAQSMFLQGERTDEKEIPKEQKVVYLGTWYGHIAANGTSWTGKASDQQSGNRAKFDVNFKDKKITGTLTAANRQAETFTISGMIDGNGFEGTAKTGNGGFALDANNTAATHKAHIAEAKVRGGFYGPNAEELGGWFAYPGNGQAKNAQASSGNENSAGSATVVFGAKRQQLVQ

SEQ ID NO: 212 - protein, 682 aa, Neisseria gonorrhoeae
CLGGGGSFDLDSVDTEAPRAAPKYQDVPSKKPEARKDQGGYGFAMRFKRRNWYPPANPKEEKIPLSENDWEQTDNGNIKNPSKQKNIINALSGNGGASLQDSSQQGEGISKVTDHHDFKYVWSGFFYKQIGNTIKRDDSSSKVIEARNGPDGYIFYKGTDPSRKLPVSGSVEYKGTWDFLTDVQANQKFTDLGSAFTKSGDRYSAFSGELDYIVRKEEDKKDKHVGLGLTTEITVDFEKKTLNGKLIKNNMVINNKDEYTTQYYSLDATLRGNRFSGKAMATDKSKNGETGDQTKQHPFVSDSSSLSGGFFGPKGEELGFRFLSDDGKVAVVGSAKTKDKAENGGGNGDSGGASVSASGGTTGTPSENGKLTTVLDAVELTPNGKEIKNLDNFSNAAQLVVDGIMIPLLPTESGNGQADKGENGKTAFIYETTYTPESDEKDTQTGMAANGVQTVSNAAGGTSGKTKTHYEVQACCSNLNYLKYGLLTRKTADNTGGGGKGSQAAAQTAQGAQSMFLQGERTDEKQIPKDENVVYLGSWYGYIANGTSWSGNASNTTSGNKAEFTVNFDKKKITGMLTAANRQEATFTIDAMIESNGFKGMAKTGNGGFAPDQNSSTGTHKVHITSAAVQGGFYGPKAEELGGWFAYPGNGQTKNAQASSGNGNSAGSATVVFGAKRQQLVK

SEQ ID NO: 213 - protein, 341 aa, Neisseria gonorrhoeae
TKDSTANGNAPAASSGPGAATMPSETRLTTVLDAVELTPDGKEIKNLDNFSNATRLVVDGIMIPLLPTESGNGQADKGKNGGTDFTYETTYTPESDKKDTKAQTGAGGMQTASGTAGVNGGQVGTKTYKVQVCCSNLNYLKYGLLTRENNNSVMQAVKNSSQADAKTKQIEQSMFLQGERTDENKIPQEQGIVYLGFWYGRIANGTSWSGKASNATDGNRAKFTVNFDRKEITGTLTAENRSEATFTIDAMIEGNGFKGTAKTGNDGFAPDQNNSTVTHKVHIANAEVQGGFYGPNAEELGGWFAYPGNEQTKNATVESGNGNSASSATVVFGAKRQKLVK

SEQ ID NO: 214 - protein, 301 aa, Neisseria gonorrhoeae
DLDNFSNAAQLVVDGIMIPLLSTESGNGQADKGKNGGTDFTYTTTYMPESDKKDTKAQTGAGGMQTASDAAGVNGGQAGTKTYKVEACCSNLNYLKYGLLTRENSNSVMQTVRNSSQAAARTAQGAQSMFLQGERTDEKEIPKEQKVVYLGTWYGHIAANGTSWTGNASDQQSGNRAKFDVNFKDKKITGTLTAANRQEATFTIDAMIDDNGFKGTAKTGNDGFAPDQNSSTGTYKVHIANAEVQGGFYGPNAEELGGWFAYPGNGQTKNAQENAQASSGNGNSAVSATVVFGAKRQQLVK

SEQ ID NO: 215 - protein, 343 aa, Neisseria gonorrhoeae
TKDEATNGNTAAASSGPGAATMPSETRLTTVLDAVELTPDGKEIKDLDNFSDATRLVVDGIMIPLLPKDSESGVSQPDKGENGGTDFTYTTTYMPESDKKDTKAQTGAGGMQTASGAAGVNSGQAGTKTYKVEACCSNLNYLKYGMLTRKNSESAMQAGGSSNQADAKTEQAEQSMFLQGERTDEKQIPKDENVVYLGSWYGRIANGTSWSGNASNTTSGNKAEFTVNFDKKEITGMLTAANRPEATFTIDAMIDGNGFKGTAKTGNDGFAPDQNNSTVTHKVHIAEAKVRGGFYGPNAEELGGWFAYPGNGQAKNAQTSSGDGNSAGSATVVFGAKRQELVQ

SEQ ID NO: 216 - protein, 346 aa, Neisseria gonorrhoeae
TRDKAENGGGNGASGGASVSASNGAAGMPSENGKLTTVLDAVELESDGKKVKNLDNFSDATRLVVDGIMIPLLPTESGNGQADKGKNGGTDFTYTTTYTPESDKEDTQTGMAANGVQTVSNAAGGTSGKTKTHYEVQACCSNLNYLKYGLLTRKTAGNTGGGGNGSQAVQTAQGAQSMFLQGERTDEKEIPKDGNVVYLGTWYGHIAINGTSWTREASNQENGNRAKFDVNFKDKKITGTLTAANRQEATFTIDAMIEGNGFKGTAKTGDGGFAPDQNNSTGTHKVHIAEAKVQGGFYGPNAEELGGWFAYPGNGQAENAQTSSGNGNSAGSATVVFGAKRQELVK

SEQ ID NO: 217 - protein, 341 aa, Neisseria gonorrhoeae
TKDKNANGNTAAAGTAGAAGMSSEDTKLTTVLDAVELTPDGKKVKNLDNFSDATQLVVDGIMIPLLPTESGNGQADKGENGKTAFIYETTYTPESDKKDTQTGMATNGVQTVSNTAGGTSGKTKTHYKVQACCSNLNYLKYGLLTRENSNSVMQTVRNSSQAAARTEQGAQSMFLQGERTDEKEIPKEQKVVYLGTWYGHIAANGTSWTGKASDQQSGNRAKFDVNFKDKKITGTLTAANRQAETFTISGMIDGNGFEGTAKTGNGGFALDANNTAATHKAHIAEAKVRGGFYGPNAEELGGWFAYPGNGQAKNAQASSGNENSAGSATVVFGAKRQQLVQ

SEQ ID NO: 218 - protein, 346 aa, Neisseria gonorrhoeae
TKDKAENGGGNGDSGGASVSASGGTTGTPSENGKLTTVLDAVELTPNGKEIKNLDNFSNAAQLVVDGIMIPLLPTESGNGQADKGENGKTAFIYETTYTPESDEKDTQTGMAANGVQTVSNAAGGTSGKTKTHYEVQACCSNLNYLKYGLLTRKTADNTGGGGKGSQAAAQTAQGAQSMFLQGERTDEKQIPKDENVVYLGSWYGYIANGTSWSGNASNTTSGNKAEFTVNFDKKKITGMLTAANRQEATFTIDAMIESNGFKGMAKTGNGGFAPDQNSSTGTHKVHITSAAVQGGFYGPKAEELGGWFAYPGNGQTKNAQASSGNGNSAGSATVVFGAKRQQLVK

SEQ ID NO: 219 - protein, 706 aa, Moraxella catarrhalis
MKHIPLTTLCVAISAVLLTACGGSGGSNPPAPTPIPNASGSGNTGNTGNAGGTDNTANAGNTGGTNSGTGSANTPEPKYKDVPTDENKKDEVSGIQEPAMGYGMALSKMNLHKQQDTPLDEKDIITLDGKKQVAKGEKSPLPFSLDVENKLLDGYIAKMNEADKNAIGDRIKKDNKDKSLSKAELAKQIKEDVRKSHEFQQVLSSLKNKIFHSNDGTTKATTRDLQYVDYGYYLVNDGNYLTVKTDELWNLGPVGGVFYNGTTTAKELPTQDAVKYKGHWDFMTDVAKQRNRFSEVKENLQAGRYYGASSKDEYNRLLTDEKNKPERYNGEYGHSSEFTVNFKDKKLTGELFSNLQDSRKGNVTKTKRYDIDANIYGNRFRGSATASDKAEASKTKHPFTSDAKNSLEGGFYGPNAEELAGKFLTNDNKLFGVFGAKRESKAGEKTEAILDAYALGTFNKNNATTFTPFTKKQLDNFGNAKKLVLGSTVIDLVPTGVTKDVNEFTKNKPDSATNKAGETLMVNDKVSVKTYGYGRNFEYLKFGELSVGTSNSVFLQGERTATTGEKAVPTKGTAKYLGNWVGYITGKDSSKSFNEAQDVADFDIDFEKKSVKGKLTTKDRQDPVFNITGDIAGNGWTGKASTTKADAGGYKIDSSSTGKSIVIKDAEVTGGFYGPNANEMGGSFTHNTDDSKASVVFGTKRQEEVK

SEQ ID NO: 220 - protein, 714 aa, Moraxella catarrhalis
MKHIPLTTLCVAISAVLLTACGGSGGSNPPAPTPIPNASGSGNTGNTGNAGGTDNTANAGNTGGASSGTGSANTPEPKYQDVPTDKNEKEQVSPIQEPAMGYGMALSKINLHNRQDTPLDEKNIITLDGKKQVAEGKKSPLPFSLDVENKLLDGYIAKMNEADKNAIGDRIKRENEQNKKISDEELAKKIKENVRKSPDFQKVLSSIKAKTFHSNDGTTKATTRDLQYVDYGYYLVNDADYLTVKTDSPKLWNLGPVGGVFYNGTTTAKELPTQDAVKYKGHWDFMTDVANKRNRFSEVKETPQAGWYYGASSKDEYNRLLTRKDSAPDNYSGEYGHSSEFTVNFKEKKLTGELSSNLQDRHKGDVTKTKRYDIKADIHGNRFRGSAIASDKDDASKAKHPFTSDAKDRLEGGFYGPKGEELAGKFLTDDKKLFGVFGAKRESKAEEKTEAILDAYALGTFNNTNKATTFTPFTKKQLDNFGNAKKLVLGSTVIDLVSTDATKNEFTKEFTKDKPTSATNKAGETLMVNDEVSVKTYGKNFEYLKFGELSVGGSHSVFLQGERTATTGDKAVPTTGTAKYLGNWVGYITGKDTGTGTGKSFTDAQDVADFDIDFGNKSVSGKLITKGRQDPVFNITGQIAGNGWTGKASTAKADAGGYKIDSSSTGKSIVIENAEVTGGFYGPNANEMGGSFTHNADDKVSVVFGTKKQEVKQK

SEQ ID NO: 221 - protein, 709 aa, Moraxella catarrhalis
MKHIPLTTLCVAISAVLLTACGGSSGGFNPPASTPIPNAGNSGNAGNAGNAGGTGGANSGAGNAGGTGGANSGAGSASTPEPKYKDVPTDENKKAEVSGIQEPAMGYGVELKLRNWIPQEQEEHAKINTNDVVKLEGDLKHNPFDNSIWQNIKNSKEVQTVYNQEKQNIEDQIKRENKQRPDKKLDDVALQAYIEKVLDDRLTELAKPIYEKNINYSHDKQNKARTRDLKYVRSGYIYRSGYSNIIPKKIAKTGFDGALFYQGTQTAKQLPVSQVKYKGTWDFMTDAKKGQSFSSFGTSQRLAGDRYSAMSYHEYPSLLTDEKNKPDNYNGEYGHSSEFTVDFSKKSLKGELSSNIQDGHKGSVNKTKRYDIDANIYGNRFRGSATASDTTEASKSKHPFTSDAKNSLEGGFYGPNAEELAGKFLTNDNKLFGVFGAKRESEAKEKTEAILDAYALGTFNKPGTTNPAFTANSKKELDNFGNAKKLVLGSTVIDLVPTGATKDVNEFKEKPKSATNKAGETLMVNDEVIVKTYGYGRNFEYLKFGELSIGGSHSVFLQGERTAEKAVPTEGTAKYLGNWVGYITGKDTGTSTGKSFNEAQDIADFDIDFERKSVKGKLTTQGRQDPVFNITGQIAGNGWTGTASTAKANVGGYKIDSSSTGKSIVIENAKVTGGFYGPNANEMGGSFTHDTDDSKASVVFGTKRQEEVK

SEQ ID NO: 222 - protein, 709 aa, Moraxella catarrhalis
MKHIPLTTLCVAISAVLLTACGGSGGSNPPAPTPIPNASGSGNTGNTGNAGGTDNTANAGNTGGASSGTGSANTPEPKYQDVPTDKNEKEQVSPIQEPAMGYGMALSKINLHNRQDTPLDEKNIITLDGKKQVAEGKKSPLPFSLDVENKLLDGYIAKMDKADKNAIRRRIESENKAKPLSEAELAEKIKEAVRKSYEFQQVMTSLENKIFHSNDGTTKATTRDLQYVDYGYYLANDANYLTVKTDKPKLWNSGPVGGVFYNGSTTAKELPTQDAVKYKGHWDFMTDVANKGNRFSEVKGTRQAGWWYGASSKDEYNRLLTDEKNKPDGYNGEYGHSSEFTVNFKEKKLTGGLFSNLQDSHKQKVTKTKRYDIDANIHGNRFRGSAIASDKEKDSETKHPFTSDAKDRLEGGFYGPKGEELAGKFLTDDNKLFGVFGAKQESKADKTEAILDAYALGAFNKNDANTFTPFTKKQLDNFGNAKKLVLGSTVIDLVPTGAAKDVNEFTKEKPKSATNEAGETLMVNDEVIVKTYGYGKNFEYLKFGELSVGDSHSVFLQGERTATTGEKAVPTKGTAKYLGNWVGYITGKDSSKSFNEAQDVADFDIDFEKKSVKGKLTTKDRTDPVFNITGQIAGNGWTGKASTAKADAGGYKIDSSSTGKSIVIENANVTGGFYGPNANEMGGSFTHNADDSKASVVFGTKRQQEVKQK

SEQ ID NO: 223 - protein, 711 aa, Moraxella catarrhalis
MKHIPLTTLCVAISAVLLTACGGSGGSNPPAPTPIPNASGSGNTGNTGNAGGTDNTANAGNTGGTSSGTGSASTSEPKYQDVPTTPNTKEQVSSIQEPAMGYAMELKLRNAHPHNPNKETEKRIALDQKDLVAVEGNLTNIPFDKNLIEYLKKSPEVVSKFNEQKGGIENNTRLTHKDLSSEQKEAKVKEALDNALTQFAQEKYKELIENAHDKKSDARNRDLKYVKSGFNYLSGYTATDHDKKTNYRGYYGALYYKGSETAKELPQTSAKYKGYWDFMTDATLDNKYTDLPGIARQTQWRSLVSTDEYATLLTDKNNKPSDYNGAYGHSSEFDVNFADKKVTGKLISNQLSGKTVTAKERYKIEADIHGNRFRGSAIASEKTDESKSKHPFTSDAKDRLEGGFYGPKGEELAGKFLTDDNKLFGVFGAKRESKVEKTEAILDAYALGTFNKSGTTNPAFNANSKKELDNFGNINKLVLGSTVIDLTQGNDFVKTIDKEKPATTSNQAGEPLTVNDRVQVQVCCSNLEHLKFGSLSIGGSNSVFLQGERTATTGDKAIPVAGNAKYRGTWAGYVTGSGNTSKGYEAQKFADNANRAEFDVDFAKKSLTGKLIPNTSSDGKSAFDITATIDGNGFSGKANTPDIKTGGLKIDSKNTESGRVIVKDAVVTGGFYGPQANELGGSFTYKSNDAENKDSSAPVVFGARKQQEVKQ

SEQ ID NO: 224 - protein, 583 aa, Mannheimia haemolytica
MFKLKSSFVLLNAALLAACSSNGGSFDVQSAKVESQTQTTPKKPSLQDDNSNARRTVSASETEALLQPGFGFSAKIPRRNLFPQGKEDVAPIGDIKEITGDLTKIPYEEEVKAYGSSADGFSHTHDRNHKLYTRDFNFVRSGYVLHSGAKPEIKPKEILRTGAHGYVYYLGIEPAKAIPTQKATYKGYWDFTTDARKGRDSKYFSNSAGINIGATPENSYDINVDDSEKPMGHTGEFTADFANKTLTGTLVRNGYVSRSKEQKITTIYDIDAKIKGNRFSGKANAKNTDDPYFGKSSTTLEGGFFGGKAQELAGKFLADDKSVFVVFAGKRDAKKDDSESAFDAFKIKLKDLNKSEMDTFGNATHLIINNKQIPLIAEGKKSFAEMKFDDLVTRTIDGKTYRVSVCCNNLDYVKFGTYSEGNNSDTAHQYLVGERTAVADLPTGTVKYRGTWDGVMYSKSGSAGAESPSNSESGTRSLFDVDFVNKKINGKLIANDGVEERPMLTLEGNLKGNGFAGTAKTGNSGFNLDPKSTNGGTVVHINTQFEGGFYGPKATELGGIVHSAETDKDRVSITFGGKRQIEK

SEQ ID NO: 225 - protein, 559 aa, Mannheimia haemolytica
VQSAKVESQTQTTPKKPSLQDDNSNARRTVSASETEALLQPGFGFSAKIPRRNLNPKGKEDVAPIGDITEITGDLTKIPHEEEVKKYGSSDDGFSHTHDGNHKLHTRDFNFVRSGYVLHSGAKPEIIRSDNILRIGAHGYVYYLGIEPAKAIPTQKATYKGYWDFTTDARKGRDNKYFSNSAGINIGAIPENSHDINVDDSTKPMGHTGEFTADFANKTLTGTLVRNGYVSRIKEQKITPIYDIDAKIKGNRFSGKANAKNANDPYFGKSSTTLEGGFFGGEAQELAGKFLADDKSVFVVFAGKRDAKENDSERTFDAFKIKLKDLNKSEMDTFGNATHLIINNKQIPLIAEGKKSFAEMKFDDLVTRTIDGKTYRVSVCCNNLDYVKFGIYSEGNNNNSDTAHQYLVGERTAVADLPTGTVKYRGTWDGVMYSKSGSAGAESPSNSESGTRSLFDVDFVNKKINGKLIANDGVEERPMLTLEGELKGNGFAGTAKTGDSGFNLDPKSTNGGTVVHMNAQFEGGFYGPKATELGGIVHSAETDKDKVSITFGGKRQIEK

SEQ ID NO: 226 - protein, 559 aa, Mannheimia haemolytica
VQSSKAESHTPNVPQKPSLQDDNSNARRTVNSTEAEALLKPGFGFSAKIPRRNLQPFAKGGEEVAPIGDITEITGDITKIPYEEEVKAYGRSDDGFSHTHDGKHKLHTRDFNFVRSGYVLHSGAKPEREAKDIFRIGAHGYVYYLGTEPAKAMPAQKATYNGYWDFTTDARKGKDNKYFNDSAAGINIGATPENRHDVNVDDATKPMGHTGEFTADFTNKTLTGTLVSNGYVSRTTEQEIKPMYYIDAKIKGNRFAGKANAKNPDDPYFGKSSTTLEGGFFGGQAQELAGKFLADDKSIFVVFAGKRDAKENDSESTFDALKINLKDLSKTEMDTFGNATHLIINNQQIPLIAEGKNSFSEMKFDDVVTRTINGKTYRISVCCNNLDYVKFGTYNVENDNDSAHQYLVGERTAVMDLPSGMVQYRGTWNGIIHSKSGPVGAESPSNSESGTRSLFDVDFANKKINGKLIANDGVEERPMLTLEGEVKANGFAGTAKTSDSGFNLDPKSTNGGTVVHINTQFEGGFYGPKATELGGIVHSAETDKDKVSIMFGGKRQIEK

SEQ ID NO: 227 - protein, 588 aa, Mannheimia haemolytica
MFKIKNSVILLNAVLLSACTSNGGSFDTNSVKASSSYSSSSKDSTAQPKSERRTISSTESLAQPSLGFQTKIPRRNFFGGTGEENGAIGEITPIVGEPGKPLSLEEEMKKLEEEVKKFGYDEDDIIHTHDGKKLHRKREMKFVRSGYFIHLGAAAETKREEPRLLKTGPTGYVYYLGTQPSKAFPTQVATYEGTWDFTTNASTKNKSKYFEGGAAGTNVGATPENNQANTEVEGNPIGHSSKFEVNFSDKTLKGTLTKNGYVNLRKKDKQEITDHYKIEANIHGNRFNGKAEALKTDDPYFGKDSNTVEGGFYGDKAQELAGKFLADDKSIFVVFAGKRDEKGEDKVEKKFDSVQVSLKDLAKSDMDTFGLATHLVIDGVQIALLPEGKTRFADMDFYQVLTKNINGKDYKITVCCNNLDYVKFGTFEQKGKDGHQYLVGERTAVADLPKEARIYRYTGTWNGSIRSKDERVGGDSPSDKAHGTRSIFNVNFADKKIEGKLIANDGLETNPMLTLDGKIEGNGFSGTAKTGEKGFNIDNKSTAGGTDVHLNAKFEGGFYGPQAAELGGIVHSAETNKDKVSITFGGKR

SEQ ID NO: 228 - protein, 555 aa, Bibersteinia trehalosi
VQSVKVESNKPDSPKPSLQDDNSSARRTINNTEATALLQPGFGFSAKIPRRNQLPQANENAAPIGEITPIAGDLTKIPYEEEVKAYGYDDEGFSHTHDGHNGHNTRDFKFVRSGYVLHSGAKPEIKHKEVLRTGAHGYVYYLGTHPAKAMPAQKAIYKGYWDFTTDARKDRDSQYFSNSAGVNIGATPENSRDVNLDDAEKPMGHTGEFTADFSNKTLTGTLVRNGYVKPRTNEQKITPLYDINATIQGNRFSGKANARNTEDPYFGKDSSTLEGGFFGDNTQELAGKFLADDKSIFVVFAGKRDAQENDSERAFDALKVSLKDLSKSEMDTFGNATHLLINNTQIPLIAEGKKSFAEMKFDDLVMPTVGGKTYRISVCCNNLDYVKFGTYSEENDKDSSHLYLVGERTAVADLPSGKAQYRGTWNGIMRSEAGSAGAESPSNSESGTRSLFDVDFANKKINGKLIANDGVEERPMLTLEGEIKANGFAGTAKTSDSGFNLDPKSTWGGTVIHVDSQFEGAFYGKNALELGGIVHDSNSKDKVSITFAGKRQIAK

SEQ ID NO: 229 - protein, 342 aa, Moraxella catarrhalis
EPAMGYGMALSKINLHNRQDTPLDEKNIITLDGKKQVAEGKKSPLPFSLDVENKLLDGYIAKMNVADKNAIGDRIKKGNKEISDEELAKQIKEAVRKSHEFQQVLSSLENKIFHSNDGTTKATTRDLKYVDYGYYLANDGNYLTVKTDKLWNLGPVGGVFYNGTTTAKELPTQDAVKYKGHWDFMTDVANRRNRFSEVKENSQAGWYYGASSKDEYNRLLTKEDSAPDGHSGEYGHSSEFTVNFKEKKLTGKLFSNLQDRHKGNVTKTERYDIDANIHGNRFRGSATASNKNDTSKHPFTSDANNRLEGGFYGPKGEELAGKFLTNDNKLFGVFGAKRESKA

SEQ ID NO: 230 - protein, 264 aa, Moraxella catarrhalis
EEKTEAILDAYALGTFNTSNATTFTPFTEKQLDNFGNAKKLVLGSTVIDLVPTDATKNEFTKDKPESATNEAGETLMVNDEVSVKTYGKNFEYLKFGELSIGGSHSVFLQGERTATTGEKAVPTTGTAKYLGNWVGYITGKDTGTGTGKSFTDAQDVADFDIDFGNKSVSGKLITKGRQDPVFSITGQIAGNGWTGTASTTKADAGGYKIDSSSTGKSIAIKDANVTGGFYGPNANEMGGSFTHNADDSKASVVFGTKRQQEVK

SEQ ID NO: 231 - protein, 284 aa, Mannheimia haemolytica
TVSASETEALLQPGFGFSAKIPRRNLLPQGKEDVAPIGDIKEITGDLPKIPYEEEVKACGSSADGFSHTHDRNHKLYTRDFNFVRSGYVVHSGPKPEIKPKEILRTGAHGYVYYLGIEPPKAIPTQKLTYKGYWDFTTYAAKGRDSNIFLIPAGINSGAIPENSHDINVDDSEKPMGHTGEFTADFANKTLTGTLVRNGYVSRSKEQKITTIYDIDAKIKGNRFSGKANPKKPMILIFGKSSTTLEGGFFGGEAQELAGKFLADDKSVFVVFAGTRDAKKDDSE

SEQ ID NO: 232 - protein, 235 aa, Mannheimia haemolytica
SAFDAFPIKLKDLNKSEMDTFGNATHLIINNKQIPLIAEATKSFAEMKFDTYRVSVCCNNLDYVKFGIYSEGNNSDTALQEYLVGERTALADLPTGTVKYRGTWDGVMYSKSGSAGVESPSNSESGTRSLFDVDFVNKKINGKLIANDGVEERPMLTLEGNLKGNGFGGTAKTGNSGFNLDPKSTNGGTVGHINTQFEGGFYGPKATELGGIVQNTETDKDRVSITFGGKRQIEK

SEQ ID NO: 233 - protein, 283 aa, Mannheimia haemolytica
TVSASETEALLQPGFGFSAKIPRRNLNPKGKEDVAPIGDITEITGDLTKIPHEEEVKKYGSSDDGFSHTHDGNHKLHTRDFNFVRSGYVLHSGAKPEIIRSDNILRIGAHGYVYYLGIEPAKAIPTQKATYKGYWDFTNDARKGRDSKYFSNSAGINIGAIPENSHDINVDDSTKPMGHTGEFTADFANKTLTGTLVRNGYVSRIKEQKITPIYDIDAKIKGNRFSGKANAKNANDPYFGKSSTTLEGGFFGGEAQELPVILADDKSVFVVFAGKRDAKENDG

SEQ ID NO: 234 - protein, 247 aa, Mannheimia haemolytica
ERTFDAFKIKLKDLNKSEMDTFGNATHLIINNKQIPLIAEGKKSFAEMKFDDLVTRTIDGKTYRVSVCCNNLDYVKFGIYSEGNNNNSDTAHQYLVGERTAVADLPTGTVKYRGTWDGVMYSKSGSAGAESPSNSESGTRSLFDVDFVNKKINGKLIANDGVEERPMLTLEGELKGNGFAGTAKTGDSGFNLDPKSTNGGTVVHMNAQFEGGFYGPKATELGGIVHSAETDKDKVSITFGGKRQIEK

SEQ ID NO: 235 - protein, 330 aa, Neisseria meningitidis
TKDKPANGNTAEASGGAGAATMPSETRLTTVLDAVELKSDGKKVENLDNFSDATRLVVDGIMIPLLSKDSESGDGQADKGKNGGTDFTYTTTYTPESDKKDTQAQTGAGGMQTASGAAGVNGGQAGTKTYKVKVCCSNLNYLKYGLLTRENSNSVMQTVRNSSQAAAAQTAQGAQSMFLQGERTDEKEIPKDENVVYLGTWYGHIATNGTSWTREASNQENGNRAKFDVNFKYKKITGTLTAENRSEATFTIDGMIQGNGFKGTAKTGNDGFAPDQNNSTVTHKVHIANAEVQGGFYGPNAEELGGWFAYPGNGQAKNATAVSGNGNSAG

SEQ ID NO: 236 - protein, 340 aa, Neisseria meningitidis
TQDKPENGAAASGGTDAAASNGAAGTSSENSKLTTVLDAVELKSGGKEVKNLDNFSNAAQLVVDGIMIPLLPKDSESGNTQADKGKNGGTEFTRKFEHTPESDKKDAQAGTQTNGAQTASNTAGDTNGKTKTYEVEVCCSNLNYLKYGMLTRKNSKSAMQAGENGSQADAKTEQVEQSMFLQGERTDEKEIPTDQNVVYRGSWYGYIANDKSTSWSGNASDREGGNRADFTVNFGEKKITGTLTAENRQAATFTIEGDIEGNGFSGTAKTDNLGFDLDQSDNTRTPKAYITDAKVQGGFYGPRAEELGGWFAYPGDKQTKNAPVASGNGNSASSATVVFG

SEQ ID NO: 237 - protein, 340 aa, Neisseria meningitidis
TQDKAANGNTAAASGGTDAAASGGAAGTSSENSKLTTVLDAVELTLNDKKIKNLDNFSNAAQLVVDGIMIPLLPKDSEIGSNQADKGKNGGTDFTRKFDHTPKSDEKDTQAQTGAGGAQTASGTEGVNGGQAGTKTYEVEVCCSNLNYLKYGMLTRKNSKSAMQAGGNSSQADAKTEQVEQSMFLQGERTDEKEIPKEQQDIVYRGSWYGHIASSTSWSGNASDKEGGNRAEFTVNFGTKKINGTLTAENRQQATFTIEGDIKDNGFEGTAKTAELGFDLDQSDNTRTPKAYITNAKVQGGFYGPKAEELGGWFAYPGDKQAQPPASGSGTSAANSATVV

SEQ ID NO: 238 - protein, 340 aa, Neisseria meningitidis
TKDKDANGNTEAASGGTGSAASGGVADMPSENGKLTTVLDAVELTLNDKKIKNLDNFSNAAQLVVDGIMIPLLPEASESGNNQANQGTNGGTAFTRKFDHTPNSDEKDTQAGTAENGNPAASNTAGDANGKTKTYAVEVCCSNLNYLKYGLLTRKTAGNTGEGGNGSPTAAQTDAQSMFLQGERTDEKEIPSEQNVVYRGSWYGHIANDTSWSGNASDREGGNRADFTVNFGTKKINGTLTAENRQQATFTIEGDIKDNGFEGTAKTADLGFDLDQSNTTGTPKAYITNAKVQGGFYGPKADELGGWFAYPGDKQTENATVASGNGNSASSATVVFGAKR

SEQ ID NO: 239 - protein, 350 aa, Neisseria meningitidis
TKDKDANGNTEAASGGTGAAASGGAAAMPSENGKLTTVLDAVELTRGGKAIKNLDNFSNAAQLVVDGIMIPLLPKDSESGNNQADKGKNGKNGKNGGTDFTYKTTYTPKSDEKDTQAGTPTNGAQTASNTAGDTNGKTKTYEVEVCCSNLNYLKYGMLTRKNSKSAMQAGESSSQADAKTEQVEQSMFLQGERTDEKEIPKEQNVVYRGSWYGHIANDTSWSGNASDKEGGNRAEFTVDFADKKITGKLTAENRQAQTFTIEGMIQGNGFEGTAKTAESGFDLDQKNTTRTPKAYITDAKVKGGFYGPKAEELGGWFAYPGDKQTKNATATSSDGKSASSATVVFGAKRQ

SEQ ID NO: 240 - protein, 340 aa, Neisseria meningitidis
TKDNTANGNTAAASGGAGAAASGGAAAMPSENSKLTTVLDAVELTHGGTAIKNLDNFSNAAQLVVDGIMIPLLPEASESGNTNQGTNGGTAFTRKFAHTPKSDEKDTQAGTAANGDQAASNTAGDTNGKTKTYEVEVCCSNLNYLKYGLLTRKTAGNTGEGGNGSPTAAQTGAQSMFLQGERTDEKEIPKEQQNIVYRGSWYGHIANGTSWSGNASNATSGNKADFTVNFGEKKINGTLTAENRQAATFTIEGMIQGNGFSGTAKTADLGFDLDQSNTTGTPKAYITNAKVQGGFYGPKAEELGGWFAYPGDKQTENATVASGNGNSASSATVVFGAKRQ

SEQ ID NO: 241 - protein, 340 aa, Neisseria meningitidis
TKDNTANGNTAAASGGAGAAASGGAAAMPSENSKLTTVLDAVELTHGGTAIKNLDNFSNAAQLVVDGIMIPLLPEASESGNTNQGTNGGTAFTRKFAHTPKSDEKDTQAGTAANGDQAASNTAGDTNGKTKTYEVEVCCSNLNYLKYGLLTRKTAGNTGEGGNGSPTAAQTGAQSMFLQGERTDEKEIPKEQQNIVYRGSWYGHIANGTSTSWSGNASDKEGGNRADFTVNFGEKKINGTLTAENRQQATFTIEGMIQGNGFSGTAKTADSGFDLDQSNTTGTPKAYITNAKVQGGFYGPKAEELGGWFAYPGDKQAQPPASGSGASAANSATVVFGAKR

SEQ ID NO: 242 - protein, 340 aa, Neisseria meningitidis
TQDKPGNGAAASDGAGAAASNGAAAMPSENGKLTTVLDAVELTHGGTAIKNLDNFSNAAQLVVDGIMIPLLPEASESGNNQANQGTNGGTAFTRKFDHTPKSDEKDTQAGTAANGNPAASNTAGDTNGKTKTYEVEVCCSNLNYLKYGLLTRKTAGNTVGSGNGSPTAAAQTDAQSMFLQGERTDEKEIPSEQNVVYRGSWYGHIANSTSWSGNASNATSGNKADFTVNFGEKKITGTLTAENRQAATFTIEGTIQGNGFSGTAKTADSGFDLDQSNTTGTPKAYITNAKVQGGFYGPKAEEMGGWFAYPGDSQTQPSASGSGASAANSATVVFGAKRQQ

SEQ ID NO: 243 - protein, 340 aa, Neisseria meningitidis
TQDKPGNGAAASDGAGAAASNGAAAMPSENGKLTTVLDAVELTHGGTAIKKLDNFSNAAQLVVDGIMIPLLPKDSESGNNQANQGTNGGTAFTRKFAHTPKSDEKDTQAGTAANGDQAASNTAGDTNGKTKTYEVEVCCSNLNYLKYGLLTRKTAGNTGEGGNSSPTAAQTAQGAQSMFLQGERTDENKIPTDQNVVYRGSWYGHIANGTSWSGNASDKEGGNRAEFTVNFDKKKINGTLTADNRQAATFTIEGDIEGNGFSGTAKTADSGFDLDQSNNTRTPKAYITNAKVQGGFYGPKAEELGGWFAYSDDKQTKNATDASGNGNSASSATVVFGAKR

SEQ ID NO: 244 - protein, 340 aa, Neisseria meningitidis
TQDKPGNGAAASDGAGAAASNGAAAMPSENGKLTTVLDAVELTHGGTAIKKLDNFSNAAQLVVDGIMIPLLPKDSESGNNQANQGTNGGTAFTRKFAHTPKSDEKDTQAGTAANGDQAASNTAGDTNGKTKTYEVEVCCSNLNYLKYGLLTRKTAGNTGEGGNGSPTAAQTGAQSMFLQGERTDEKEIPNDQNIVYRGSWYGHIANGTSWSGNASNATSGNRADFTVNFGEKKITGTLTAENRQAATFTIEGMIQGNGFEGTAKTGDGGFALDPKNTEASHKASINATVTGGFYGPKAEEMGGWFAYPGDSQTQPSASGSGASAANSATVVFGAKRQQLV

SEQ ID NO: 245 - protein, 340 aa, Neisseria meningitidis
TQDKPGNGAAASDGAGAAASNGAAAMPSENGKLTTVLDAVELTHGGTAIKKLDNFSNAAQLVVDGIMIPLLPEASESGNNQANQGTNGGTAFTRKFDYTPKSDEKDAQAGTAANGDQAASNTAGDANGKTKTYAVEVCCSNLNYLKYGLLTRKTAGNTGEGGNGSPTAAAQTDAQSMFLQGERTDEKEIPNDQNIVYRGSWYGHIANGTSWSGNASNATSGNKADFTVNFGEKKINGTLTAENRQAATFTIEGTIQGNGFSGTAKTADSGFDLDQSNTTGTPKAYITDAKVQGGFYGPKAEELGGWFAYPGDKQAQPSVSGSGASAANSATVVFGAKRQQ

SEQ ID NO: 246 - protein, 340 aa, Neisseria meningitidis
TKDNTANGNTAAASGGTGAAASGGAAAMPSENGKLTTVLDAVELKSGGKEVKNLDNFSNAAQLVVDGIMIPLLPEASESGHNQANQGTNGGTAFTRKFDYTPNSDEKDTQAGTAENGNPAASNTAGDANGKTKTYAVEVCCSNLNYLKYGLLTRKTAGNTVGSGNGSPTAAAQTAQGAQSMFLQGERTDENKIPSEQNVVYRGSWYGHIANGTSWSGNASDKEGGNRAEFTVNFADKKLDGTLTAGERTSPTFTITATIQGNGFEGTAKTADSGFDLDQSNTTRTPKAYITNAKVQGGFYGPKAEELGGWFVYPGDSQAQPSASGSGTSAANSATVVFGA

SEQ ID NO: 247 - protein, 340 aa, Neisseria meningitidis
TQDKDANGNTEAASGGTGAAASGGAAAMPSENGKLTTVLDAVELKSGGKEVKNLDNFSNAAQLVVDGIMIPLLPETSESGKNQADKGKNGETEFTRKFDYTPESDKKDTQAGTPTNGAQTASNTAGDTNGKTKTYEVEVCCSNLNYLKYGLLTRKTAGNTVGSGNGSQAAAQTDAQSMFLQGERTDEKEIPSEQNVVYRGSWYGHIANGTSWSGNASDKEGGNRAEFTVDFGAKKINGKLTAENRQAATFTIEGDIEGNGFSGTAKTAESGFDLDQSNTTRTPKAYITDAKVQGGFYGPKAEELGGWFAYPGDKQTKNATNASGNSSATVVFGAKRQQPV

SEQ ID NO: 248 - protein, 340 aa, Neisseria meningitidis
TQDKDANGNTEAASGGTGAAASGGAAAMPSENGKLTTVLDAVELKSGGKEVKNLDNFSNAAQLVVDGIMIPLLPETSESGKNQADKGKNGETEFTRKFDYTPESDKKDTQAGTPTNGAQTASNTAGDTNGKTKTYEVEVCCSNLNYLKYGLLTRKTAGNTVGSGNGSQAAAQTDAQSMFLQGERTDEKEIPSEQNVVYRGSWYGYIANDKSTSWSGNASNATSGNRAEFTVNFADKKITGTLTADNRQEATFTIDGNIKDNGFEGTAKTAESGFDLDQSNTTRTPKAYITDAKVQGGFYGPKAEELGGWFAYPGDKQTKNATNASGNSSATVVFGAKRQQ

SEQ ID NO: 249 - protein, 340 aa, Neisseria meningitidis; identical to SEQ ID NO: 194

SEQ ID NO: 250 - protein, 340 aa, Neisseria meningitidis
TQDKPENGAAASGGTGAAASGGAADMPSENGKLTTVLDAVELTHGGTAIKKLDNFSNAAQLVVDGIMIPLLPEASESGNNQANQGTNGGTAFTRKFDYTPKSDEKDAQAGTAANGDQAASNTAGDANGKTKTYAVEVCCSNLNYLKYGLLTRKTAGNTVGSGNGSPTAAAQTDAQSMFLQGERTDEKEIPNDQNIVYRGSWYGHIANGTSWSGNASNATSGNKADFTVNFGEKKINGTLTAENRQAATFTIEGMIQGNGFSGTAKTADLGFDLDQSNTTGTPKAYITNAKVQGGFYGPKAEELGGWFAYPGDKQAQPPASGSGASAANSATVVFGAKRQQ

SEQ ID NO: 251 - protein, 340 aa, Neisseria meningitidis
TQDKPGNGAAASGGAGAAASGGAADMPSENGKLTTVLDAVELTHGGKAIKNLDNFSNAAQLVVDGIMIPLLPEASESGNNQANQGTNGGTAFTRKFAHTPNSDEKDTQAGTAENGNPAASNTAGDTNGKTKTYAVEVCCSNLNYLKYGLLTRKTAGNTVEGGNGSPTAAQTAQGAQSMFLQGERTDEKEIPKEQQNIVYRGSWYGHIANGTSTSWSGNASDKEGGNRADFTVNFGEKKINGTLTAENRQQATFTIEGMIQGNGFSGTAKTADSGFDLDQSNTTGTPKAYITNAKVQGGFYGPKAEELGGWFAYPGDNQAQPSASGSGASAANSATVVFGA

SEQ ID NO: 252 - protein, 330 aa, Neisseria meningitidis
TQDKPGNGAAASDGAGAAASGDAADMPSENSKLTTVLDAVELTHSGKAIKNLDNFSNAAQLVVDGIMIPLLPETSESGKNQADKGKNGETEFTRKFDYTPESDKKDTQAGTPTNGAQTASNTAGDTNGKTKTYEVEVCCSNLNYLKYGLLTRKTAGNTVGSGNGSQAAAQTDAQSMFLQGERTDEKEIPSEQNVVYRGSWYGHIANGTSWSGNASDKEGGNRAEFTVDFGAKKINGKLTAENRQAATFTIEGDIEGNGFSGTAKTAESGFDLDQSNTTRTPKAYITDAKVQGGFYGPKAEELGGWFAYPGDKQTKNATNASGNSSATVVF

SEQ ID NO: 253 - protein, 340 aa, Neisseria meningitidis
TKDKPANGNTAEASGGTDAAASGGTAGTPSESTKLTTVLDAVELKSGGKEVKNLDNFSNAAQLVVDGIMIPLLPKDSESGNNQADKGKNGGTAFTYTTTYTPKSDKKDTQAQTVTGGTQTASGTEGVNGGQAGTKTYEVEVCCSNLNYLKYGLLTRKTAGNTGEGGNGSPTAAAQMAQGAQSMFLQGERTDEKEIPSDQNVVYRGSWYGHIANGTSWSGNASDKEGGNRAEFTVNFGEKKINGTLTAGERTSPTFTITATIQGNGFEGTAKTGDDGFALDTKNTVETHKAHIADAKVQGGFYGPKAEELGGWFAYPGDKQAQPSASGSGTSAANSATVVF

SEQ ID NO: 254 - protein, 340 aa, Neisseria meningitidis
TKDKPANGNTAEASGGTDAAASGGTAGTPSESTKLTTVLDAVELKSGGKEVKNLDNFSNAAQLVVDGIMIPLLPETSESGSNQADKGKNGETEFTRKFDHTPKSDKKDAQAGTQTNGAQTASNTAGDTNGKTKTYEVEVCCSNLNYLKYGMLTRKNSKSAMQAGENGSQADAKTEQVEQSMFLQGERTDEKEIPSEQNIVYRGSWYGHIANGTSTSWSGNASDKEGGNRADFTVNFGEKKINGTLTAENRQQATFTIEGMIQGNGFSGTAKTADSGFDLDQSNTTGTPKAYITNAKVQGGFYGPKAEELGGWFAYPGDKQAQPPASGSGASAANSATVVF

SEQ ID NO: 255 - protein, 340 aa, Neisseria meningitidis
TKDKPANGNTAEASGGTDAAASGGTAGTPSESTKLTTVLDAVELKSGGKEVKNLDNFSNAAQLVVDGIMIPLLPKDSESGGNQADKSKNGETAFTRKFDHTPKSDEKDTQAGTPTNGAQTASNTAGDTNGKTKTYEVEVCCSNLNYLKYGMLTRKNSKSAMQAGGNSSQADAKTEQVEQSMFLQGERTDEKEIPKEQQDIVYRGSWYGHIANGTSWSGNASDKEGGNRAEFTVNFGDKKITGTLTAENRQAATFTIEGDIEGNGFSGTAKTAELGFDLDQSDNTRTPKAYITDAKVKGGFYGPKAEELGGWFAYPSDKQTKNAPDASGNGNSASSATVVF

SEQ ID NO: 256 - protein, 340 aa, Neisseria meningitidis
TKDNTANGNTAAASGGTGAAASGGAADMPSENSKLTTVLDAVELTHGGTAIKNLDNFSNAAQLVVDGIMIPLLPEASESGNNQANQGTNGGTAFTRKFAHTPKSDEKDTQAGTAENGNPAASNTAGDTNGKTKTYAVEVCCSNLNYLKYGLLTRKTAGNTGEGGNGSPTAAAQTAQGAQSMFLQGERTDEKEIPSEQNVVYRGSWYGHIANDTSTSWSGNASDKEGGNRADFTVNFGEKKINGTLTAENRQAATFTIEGMIQGNGFSGTAKTADLGFDLDQSNTTGTPKAYITNAKVQGGFYGPKAEEMGGWFAYPGDKQTENATVASGNGNSASSATVV

SEQ ID NO: 257 - protein, 340 aa, Neisseria meningitidis
TKDKTENGAAASGGAGAAASGGAAAMPSENSKLTTVLDAVELTHSGTAIKNLDNFSNAAQLVVDGIMIPLLPEASESGNTNQGTNGGTAFTRKFDYTPNSDEKDTQAGTAENGNPAASNTAGDANGKTKTYAVEVCCSNLNYLKYGLLTRKTAGNTGEGGNGSPTAAAQTAQGAQSMFLQGERTDEKEIPSEQNVVYRGSWYGHIANGTSTSWSGNASDKEGGNRAEFTVNFGDKKITGTLTADNRQAATFTIEGDIEGNGFSGTAKTDNLGFDLDQSDNTRTPKAYITDAKVQGGFYGPKAEELGGWFAYPGDKQTEKATATSSDGKSASSATVVFGAK

SEQ ID NO: 258 - protein, 340 aa, Neisseria meningitidis
TQDKAANGNTAAASDGAGAAASGSAAAMPSENGKLTTVLDAVELTHGGKAIKNLDNFSNAAQLVVDGIMIPLLPKDSESGNNQANQGTNGGTAFTRKFDHTPQSDEKDAQAGTAANGDQAASNTAGDTNGKTKTYEVEVCCSNLNYLKYGLLTRKTAGNTGEGGNGSQTAAQTAQGAQSMFLQGERTDEKEIPSEQNVVYRGSWYGHIANDTSTSWSGNASNATSGNKADFTVNFGEKKINGTLTAENRQQATFTIEGMIQGNGFSGTAKTADSGFDLDQSNTTGTPKAYITNAKVQGGFYGPKAEELGGWFAYPGDKQAQPPASGSGASAANSATVVFG

SEQ ID NO: 259 - protein, 340 aa, Neisseria meningitidis
TQDKDANGNTEAASGGTGAAASGGAADMPSENSKLTTVLDAVELTHGGTAIKNLDNFSNAAQLVVDGIMIPLLPEASESGNTNQGTNGGTAFTRKFAHTPKSDEKDTQAGTAANGDQAASNTAGDTNGKTKTYEVEVCCSNLNYLKYGLLTRKTAGNTGEGGNGSPTAAQTAQGAQSMFLQGERTDENKIPSEQNVVYRGSWYGHIANGTSWSGNASNATSGNKADFTVNFGEKKITGTLTAENRQQATFTIEGMIQGNGFSGTAKTANSGFDLDQSNTTGTPKAYITNAKVQGGFYGPKAEELGGWFAYPGDKQTENTTVASGNGNSASSATVVFGAKR

SEQ ID NO: 260 - protein, 340 aa, Neisseria meningitidis
TQDKDANGNTEAASGGTGAAASGGAADMPSENSKLTTVLDAVELTHGGTAIKNLDNFSNAAQLVVDGIMIPLLPKDSESGNTNQGTNGGTAFTRKFDYTPKSDEKDAQAGTAANGDQAASNTAGDANGKTKTYAVEVCCSNLNYLKYGLLTRKTAGNTGEDGNGSPTAAAQTDAQSMFLQGERTDEKEILNDQNIVYRGSWYGHIANGTSWSGNASNATSGNKADFTVNFGEKKINGTLTAENRQAATFTIEGTIQGNGFSGTAKTADSGFDLDQSNTTGTPKAYITDAKVQGGFYGPKAEELGGWFAYPGNSQAQPPASGSGASAANSATVVFGAKRQQ

SEQ ID NO: 261 - protein, 340 aa, Neisseria meningitidis
TQDNTANGNTAAASGGAGAAASGGAADMPSENSKLTTVLDAVELTHGDTAIKNLDNFSNAAQLVVDGIMIPLLPKDSESGNNQANQGTNGGTAFTRKFAHTPKSDEKDAQAGTAANGDQAASNTAGDTNGKTKTYEVEVCCSNLNYLKYGLLTRKTAGNTGEGGNGSPTAAAQTAQGAQSMFLQGERTDENKIPSEQNVVYRGTWYGHIANDTSWSGNASDKEGGNKADFTVNFGEKKINGTLTAENRQAATFTIEGTIQGNGFSGTAKTADSGFDLDQSNTTRTPKAYITNAKVQGGFYGPKAEELGGWFAYPGDSQAQPSASGSGTSAANSATVVFGA

SEQ ID NO: 262 - protein, 340 aa, Neisseria meningitidis
TKDKDANGNTEAASGGTGAAASGGAADMPSENSKLTTVLDAVELTHGGTAIKNLDNFSNAAQLVVDGIMIPLLSETSESGNTNQGTNGGTAFTRKFNHTPTSDEKDTQAGTAENGNPAASNTAGDANGKTKTYEVEVCCSNLNYLKYGLLTRKTAGNTGEGGNGSQTAAQTDAQSMFLQGERTDENKIPTDQNVVYRGSWYGHIANGTSWSGNASDKEGGNRAEFTVNFADKKLDGTLTAGERTSPTFTITATIQGNGFEGTAKTGDGGFALDTKNTVETHKAHISNAKVQGGFYGSKAEELGGWFAYPGDSQAQPSASGSGTSAANSATVVFGAKRQQL

SEQ ID NO: 263 - protein, 340 aa, Neisseria meningitidis; identical to SEQ ID NO: 185

SEQ ID NO: 264 - protein, 350 aa, Neisseria meningitidis
TKDKPANGNTAAASGGTDAAASNGAAGTSSENGKLTTVLDAVELKLGDKEVQKLDNFSNAAQLVVDGIMIPLLPEASESGSNQADKGKKGKNGKNGGTDFTYKTTYTPKSDEKDTQAQTVTGGTQTASNTAGDANGKTKTYAVEVCCSNLNYLKYGLLTRKTAGNTVGSGNGSPTAAAQTAQGAQSMFLQGERTDEKEIPKEQNVVYRGSWYGHIANGTSWSGNASDKEGGNRADFTVNFGEKKINGTLTAENRQAATFTIEGTIQGNGFSGTAKTANSGFDLDQSNTTGTPKAYITDAKVQGGFYGPEAEELGGWFAYPGDSQAQPSASGSGTSAANSATVVFGAKRQQ

SEQ ID NO: 265 - protein, 340 aa, Neisseria meningitidis
TKDKPANGNTAAASGGTDAAASNGAAGTSSENGKLTTVLDAVELKLGDKEVQKLDNFSNAAQLVVDGIMIPLLPEASESGNNQANQGTNGGTAFTRKFDHTPESDEKDAQAGTQTNGAQTASNTAGDTNGKTKTYEVEVCCSNLNYLKYGMLTRKNSKSAMQAGESSSQADAKTEQVEQSMFLQGERTDEKEIPSEQNIVYRGSWYGYIANDKSTSWSGNASNATSGNRAEFTVNFADKKITGTLTADNRQEATFTIDGNIKDNGFEGTAKTAESGFDLDQSNTTRTPKAYITDAKVQGGFYGPKAEELGGWFAYPGDKQTKNATNASGNSSATVVFGAK

SEQ ID NO: 266 - protein, 340 aa, Neisseria meningitidis; identical to SEQ ID NO: 186

SEQ ID NO: 267 - protein, 330 aa, Neisseria meningitidis
TKDKPENGAAASGGTDAAASGGAAAMPSENGKLTTVLDAVELKSGDKEVKKLDNFSNAAQLVVDGIMIPLLPKDSESGNNQADKGKNGETEFTRKFDYTPESDKKDTQAGTPTNGAQTASNTAGDTNGKTKTYEVEVCCSNLNYLKYGLLTRKTAGNTVGSGNGSQAAAQTDAQSMFLQGERTDEKEIPSEQNVVYRGSWYGHIANGTSWSGNASDKEGGNRAEFTVDFGAKKINGKLTAENRQAATFTIEGDIEGNGFSGTAKTAESGFDLDQSNTTRTPKAYITDAKVQGGFYGPKAEELGGWFAYPGDKQTKNATNASGNSSATVVF

SEQ ID NO: 268 - protein, 330 aa, Neisseria meningitidis
TQDKPENGAAALGGAGAAASGGVAAMPSENGKLTTVLDAVELTHGGTAIKNLDNFSNAAQLVVDGIMIPLLPETSESGKNQADKGKNGETEFTRKFDYTPESDKKDTQAGTPTNGAQTASNTAGDTNGKTKTYEVEVCCSNLNYLKYGLLTRKTAGNTVGSGNGSQAAAQTDAQSMFLQGERTDEKEIPSEQNVVYRGSWYGHIANGTSWSGNASDKEGGNRAEFTVDFGAKKINGKLTAENRQAATFTIEGDIEGNGFSGTAKTAESGFDLDQSNTTRTPKAYITDAKVQGGFYGPKAEELGGWFAYPGDKQTKNATNASGNSSATVVF

SEQ ID NO: 269 - protein, 340 aa, Neisseria meningitidis
TKDKNANGNTPAASSGAGAAASGGAADTPSESTKLTTVLDAVELKSGGKEVKNLDNFSNAAQLVVDGIMIPLLPKDSESGNTQADKGKNGGTKFTRKFEHTPESDKKDAQAGTQTNGAQTASNTAGDTNGKTKTYEVEVCCSNLNYLKYGMLTRKNSKSAMQAGENGSQADAKTEQVEQSMFLQGERTDEKEIPKEQQDIVYRGSWYGHIAGSTSWSGNASNATSGNRAEFTVNFDTKKINGKLTAENRQEATFTIEGTIQDNGFEGTAKTADLGFDLDQSNTTGTPKAYITNAKVQGGFYGPKAEELGGWFAYPGDKQTKNATNASGNSSATVVFGAKR

SEQ ID NO: 270 - protein, 340 aa, Neisseria meningitidis
TKDKAESGGGNGASGGTGAAASGGAADTPSESTKLTTVLDAVELKSGGKKVENLDNFSNAAQLVVDGIMIPLLPEASESGNTNQGTNGGTAFTRKFDHTPESDKKDAQAGTQTNGAQTASNTAGDTNGKTKTYEVEVCCSNLNYLKYGMLTRKNSKSAMQAGENGSQADAKTEQVEQSMFLQGERTDEKEIPKEQQDIVYRGSWYGHIANDTSWSGNASDREGGNRADFTVNFGTKKINGTLTAENRQQATFTIEGDIKDNGFEGTAKTDDLGFDLDQKNTTRTPKAYITNAKVQGGFYGPKAEELGGWFAYLGDKQTEKATDASGNGNSASSATVVFGA

SEQ ID NO: 271 - protein, 340 aa, Neisseria meningitidis
TKDKTENGAVASGGTDAAASNGAAGTSSENSKLTTVLDAVELKLGDKEVQKLDNFSNAAQLVVDGIMIPLLPEASESGNNQANQGTNGGTAFTRKFDHTPESDKKDAQAGTQTNGAQTASNTAGDTNGKTKTYEVEVCCSNLNYLKYGMLTRKNSKSAMQAGESSSQADAKTEQVEQSMFLQGERTDEKEIPSEQNIVYRGSWYGYIANDKSTSWSGNASNATSGNRAEFTVNFADKKITGTLTADNRQEATFTIDGNIKDNGFEGTAKTAESGFDLDQSNTTRTPKAYITDAKVQGGFYGPKAEELGGWFAYPGDKQTKNATNASGNSSATVVFGAKRQ

SEQ ID NO: 272 - protein, 340 aa, Neisseria meningitidis
TKDKLENGAAASGSTGAAASNGAAGTSSENSKLTTVLDAVELKLGDKEVQKLDNFSNAAQLVVDGIMIPLLPKASESGNNQANQGTNGGTAFTYKTTYTLESDKKDTQAQTVTNGTQTASGTESVNGGQAGTKTYEVEVCCSNLNYLKYGLLTRKTAGNTGEGGNSSPTAAQTAQGAQSMFLQGERTDENKIPTDQNVVYRGSWYGHIANGTSWSGNASDKEGGNRAEFTVNFDKKKINGTLTADNRQAATFTIEGDIEGNGFSGTAKTADSGFDLDQSNNTRTPKAYITNAKVQGGFYGPKAEELGGWFAYSDDKQTKNATDASGNGNSASSATVVFGA

SEQ ID NO: 273 - protein, 340 aa, Neisseria meningitidis
TKDKAESGGGNGASGGTGAAASNSAAAMPSENGKLTTVLDAVELTHGGTAIKNLDNFSNAAQLVVDGIMIPLLPKASESGNNQANQGTNGGTAFTYKTTYTLESDKKDTQAQTVTNGTQTASGTESVNGGQAGTKTYEVEVCCSNLNYLKYGLLTRKTAGNTGEGGNSSPTAAQTAQGAQSMFLQGERTDENKIPTDQNVVYRGSWYGHIAGSTSWSGNASNATSGNRAEFTVNFDTKKINGKLTAENRQAATFTIVGDIKDNGFEGTAKTDNLGFDLDQSNTTGTPKAYITNAKVQGGFYGPKAEELGGWFAYSDDKQTKNATDASGNGNSASSATVVF

SEQ ID NO: 274 - protein, 340 aa, Neisseria meningitidis
TKDKLENGAAASGSTGAAASGGAAGTSSENSKLTTVLDAVELKSGGKEVQKLDNFSNAAQLVVDGIMIPLLPKDSESGGNQADKSKNGGTEFTRKFDHTPKSDDKDTKAQTGAAGSSGAQTDSGKADVNGGKAETKTYAVEVCCSNLNYLKYGLLTRKTAGNTVGSGNSSQAAAQTAQGAQSMFLQGERTDEKEIPTDQNVVYRGSWYGHIANDTSWSGNASNATSGNRAEFTVDFGAKKITGTLTAENRQEATFTIEGTIQDNGFEGTAKTADLGFDLDQSNTTGTPKAYITNAKVQGGFYGPKAEELGGWFAYPGDKQTKNATNASGNSSATVVFGAK

SEQ ID NO: 275 - protein, 350 aa, Neisseria meningitidis
TKDKPANGNTAAASGGTDAAASNGAAGTSSENGKLTTVLDAVELTLNDKKIKNLDNFSNAAQLVVDGIMIPLLPQNSTGENNQPDQGKNGGTAFIYKTTYTPKNDDKDTKAQTGAAGSSGAQTASGTESVTGGQAGTKTYEVEVCCSNLNYLKYGLLTRKTAGNTVGSGNSSQAAAQTAQGAQSMFLQGERTDEKEIPKEQQDIVYRGSWYGHIANGTSWSGNASDKEGGNRAEFTVNFGDKKITGTLTADNRQAATFTIEGDIEGNGFSGTAKTDNLGFDLDQSDNTRTPKAYITDAKVQGGFYGPKAEELGGWFAYPGDKQTEKATVASGDGKSASSATVVFGAKRQQ

SEQ ID NO: 276 - protein, 340 aa, Neisseria meningitidis
TQDKPGNGAAASGGTGAAASGGAADMPSENSKLTTVLDAVELTHGGTAIKNLDNFSNAAQLVVDGIMIPLLPEASESGHNQANQGTNGGTAFTRKFNHTPTSDEKDTQAGTAANGNQAASNTAGDANGKTKTYAVEVCCSNLNYLKYGLLTRKTAGNTGEGGNGSQTAAQTDAQSMFLQGERTDENKIPTDQNVVYRGSWYGHIANGTSWSGNASDKEGGNRAEFTVNFGEKKINGTLTAENRQAATFTIEGDIKDNGFEGTAKTADLGFDLDQSNTTGTPKAYITNAKVQGGFYGPKADELGGWFAYPGDNQAQPSASGSGASAANSATVVFGAKRQQL

SEQ ID NO: 277 - protein, 340 aa, Neisseria meningitidis
TKDNTANGNTAAASGGTGAAASGGAADMPSENSKLTTVLDAVELTLNDKKIKNLDNFSNAAQLVVDGIMIPLLPKDSESGNNQANQGTNGGTAFTRKFDHTPKSDEKDTQAGTAANGDQAASNTAGDTNGKTKTYEVEVCCSNLNYLKYGLLTRKTAGNTVGSGNGSPTAAQTDAQSMFLQGERTDEKEIPNDQNIVYRGSWYGHIANGTSWSGNASNATSGNKADFTVNFGEKKINGTLTAENRQAATFTIEGTIQGNGFSGTAKTADSGFDLDQSNTTGTPKAYITNAKVQGGFYGPKAEEMGGWFAYPGDKQAQPSASGSGASAANSATVVFGAKRQ

SEQ ID NO: 278 - protein, 340 aa, Neisseria meningitidis
TQDKPENGAAALGGAGAAASGGVAAMPSENGKLTTVLDAVELTHGGTAIKNLDNFSNAAQLVVDGIMIPLLPEASESGNNQANQGTNGGTAFTRKFDHTPKSDEKDTQAGTAANGDQAASNTAGDTNGKTKTYEVEVCCSNLNYLKYGLLTRKTAGNTGEGGNGSPTAAQTAQGAQSMFLQGERTDENKIPSEQNVVYRGSWYGHIANGTSWSGNASNATSGNKADFTVNFGEKKITGTLTAENRQQATFTIEGMIQGNGFSGTAKTADSGFDLDQSNTTGTPKAYITNAKVQGGFYGPKAEELGGWFAYPGDKQAQPSASGSGASAANSATVVFGAKRQ

SEQ ID NO: 279 - protein, 539 aa, Neisseria meningitidis
NSGAAYGFAVKLPRRNAHFNPKYKEKHKPLGSMDWKKLQRGEPNSFSERDELEKKRGSSELIESKWEDGQSRVVGYTNFTYVRSGYVYLNKNNIDIKNNIVLFGPDGYLYYKGKEPSKELPSEKITYKGTWDYVTDAMEKQRFEGLGSAAGGDKSGALSALEEGVLRNQAEASSGHTDFGMTSEFEVDFSDKTIKGTLYRNNRITQNNSENKQIKTTRYTIQATLHGNRFKGKALAADKGATNGSHPFISDSDSLEGGFYGPKGEELAGKFLSNDNKVAAVFGAKQKDKKDGENAAGPATETVIDAYRITGEEFKKEQIDSFGDVKKLLVDGVELSLLPSEGNKAAFQHEIEQNGVKATVCCSNLDYMSFGKLSKENKDDMFLQGVRTPVSDVAARTEANAKYRGTWYGYIANGTSWSGEASNQEGGNRAEFDVDFSTKKISGTLTAKDRTSPAFTITAMIKDNGFSGVAKTGENGFALDPQNTGNSHYTHIEATVSGGFYGKNAIEMGGSFSFPGNAPEGKQEKASVVFGAKRQQLVQ

SEQ ID NO: 280 - protein, 280 aa, Neisseria meningitidis
NSGAAYGFAVKLPRRNAHFNPKYKEKHKPLGSMDWKKLQRGEPNSFSERDELEKKRGSSELIESKWEDGQSRVVGYTNFTYVRSGYVYLNKNNIDIKNNIVLFGPDGYLYYKGKEPSKELPSEKITYKGTWDYVTDAMEKQRFEGLGSAAGGDKSGALSALEEGVLRNQAEASSGHTDFGMTSEFEVDFSDKTIKGTLYRNNRITQNNSENKQIKTTRYTIQATLHGNRFKGKALAADKGATNGSHPFISDSDSLEGGFYGPKGEELAGKFLSNDNKVAA

SEQ ID NO: 281 - protein, 654 aa, Neisseria meningitidis
QGGYGFAMRLKRRNWYPGAEESEVKLNESDWEATGLPTKPKELPKRQKSVIEKVETDGDSDIYSSPYLTPSNHQNGSAGNGVNQPKNQATGHENFQYVYSGWFYKHAASEKDFSNKKIKSGDDGYIFYHGEKPSRQLPASGKVIYKGVWHFVTDTKKGQDFREIIQPSKKQGDRYSGFSGDGSEEYSNKNESTLKDDHEGYGFTSNLEVDFGNKKLTGKLIRNNASLNNNTNNDKHTTQYYSLDAQITGNRFNGTATATDKKENETKLHPFVSDSSSLSGGFFGPQGEELGFRFLSDDQKVAVVGSAKTKDKLENGAAASGSTGAAASGGAAGTSSENSKLTTVLDAVELTLNDKKIKNLDNFSNAAQLVVDGIMIPLLPKDSESGNTQADKGKNGGTEFTRKFEHTPESDKKDAQAGTQTNGAQTASNTAGDTNGKTKTYEVEVCCSNLNYLKYGMLTRKNSKSAMQAGGNSSQADAKTEQVEQSMFLQGERTDEKEIPTDQNVVYRGSWYGHIANGTSWSGNASDKEGGNRAEFTVNFADKKITGKLTAENRQAQTFTIEGMIQGNGFEGTAKTAESGFDLDQKNTTRTPKAYITDAKVKGGFYGPKAEELGGWFAYPGDKQTEKATATSSDGNSASSATVVFGAKRQQPVQ

SEQ ID NO: 282 - protein, 303 aa, Neisseria meningitidis
QGGYGFAMRLKRRNWYPGAEESEVKLNESDWEATGLPTKPKELPKRQKSVIEKVETDGDSDIYSSPYLTPSNHQNGSAGNGVNQPKNQATGHENFQYVYSGWFYKHAASEKDFSNKKIKSGDDGYIFYHGEKPSRQLPASGKVIYKGVWHFVTDTKKGQDFREIIQPSKKQGDRYSGFSGDGSEEYSNKNESTLKDDHEGYGFTSNLEVDFGNKKLTGKLIRNNASLNNNTNNDKHTTQYYSLDAQITGNRFNGTATATDKKENETKLHPFVSDSSSLSGGFFGPQGEELGFRFLSDDQKVAV

SEQ ID NO: 283 - protein, 513 aa, Haemophilus parasuis
EYKDVETDKKVKEQLGELMEPALGYVVKVPVSQSGVKRTEISNPEAITDEDLNKIPNYEIIKGVAYPNYGELVDKTAAETMKYVRSGYVIDVYHSGTRDKGYVFYKGITPSKELPQGPALTYQGEWDFTSDANLNNEEGRPTYLNDDYYTTWIGKRAGLVSGDAKPSKHKYTSQFKVDFATKKMTGKLSDKEKTIYTVNADIRGNRFTGSATASDKDKGKGASYNFFSVDSQSLEGGFYGPKAEEMAGKFVADDKSLFAVFSAKHNASNVNTVRIIDASKIDLTNFSISELTNFGDASVLIIDGKKMELAGSEFTNKHTIDINGKKMVAVACCSNLEYMKFGQLWQQTEGEKQVKDNSLFLQGERTATDKMPKDGNYKYIGTWDAQVSKENNYWVATADDDRKAGYRTEFDVDFGSKNLSGKLFDKNGVNPVFTVNAKIDGNGFTGEAKTSDAGFVLDPGSLRHDNVKFSDVAVSGGFYGPTAAELGGQFRYQSDNGSVGVGAVFGAKQQVKK

SEQ ID NO: 284 - DNA, 2114 bp, Neisseria meningitidis
tgtatcggcggcaatttcggcgtgcagcctgttgtcgaatcaacgccgacgtcactttcaagtctaaggacgttcccactccgccccctgccaaaccttctatagaaatcacgccggtcaaccggcccgccgtcggtgcggcaatgcggctgccaaggcggaatactgcttttcatcgtgaagatggcacggaaattccaaatagcaaacaagcagaagaaaagctgtcgtttcaagaaggtgatgttctgtttttatacggttcaaaaggaaataaacttcaacaacttaaaagcgaaattcataaacgtgattccgatgtagaaattaggacatcagaaaaggaaaataaaaaatatgattataaatttgtagatgcaggttatgtatatgtaaagggaaaagatgaaattaagtggacttcagattacaagcagttttccaaccgcttaggttatgacggttttgtatattattccggagaacgtccttcccaatctttaccgagtgcgggaacggtggaatattttggtaactggcaatatatgaccgatgccaaacgtcatcgagcaggtaaggcggttggcattgacaatttgggttattacacattttatggtaacgatgttggtgcaacttcttatgcggctaaggatgtcgacgaaagggaaaaacatcctgctaaatatacggtagatttcggtaacaaaaccctgacgggcgagctgattaaaaaccaatatgtcaaacccagtgagaagcaaaaaccgctgaccatttacaacatcactgccgatttaaacggcaaccgctttaccggcagtgccaaggtcaatcctgatttagcgaaaagccatgccaataaggagcatttgtttttccatgccgatgccgatcagcggcttgagggcggttttttcggcgataagggggaagagcttgccggacggtttatcagcaacgacaacagcgtattcggtgtattcgcaggcaaacaaaatagccccgtgccgtctggaaaacacaccaaaatcttggattctctgaaaatttccgttgatgaggcaagtggtgaaaatccccgaccgtttgccatttctcctatgcccgattttggtcatcccgacaaacttcttgtcgaagggcatgaaattcctttggttagccaagagaaaaccatcgagcttgccgacggcaggaaaatgaccgtcagtgcttgttgcgactttttgacctatgtgaaactcggacggataaaaaccgaacgtcccgccgccaaaccgaaggcgcaggacgaagaggattcggacattgataatggcgaagaaagcgaagacgaaatcggcgatgaagaagaaggcaccgaagatgcagccgcaggagatgaaggcagcgaagaagacgaagccacagaaaacgaagacggcgaagaagacgaagctgaagaacctgaagaagaatcgtcggcagaaggcaacggcagttcaaacgccatcctgcctgtcccggaagcctctaaaggcagggatatcgaccttttcctgaaaggtatccgcacggcagaaacgaatattccgcaaactggagaagcacgctataccggcacttgggaagcgcgtatcggcaaacccattcaatgggacaatcatgcggataaagaagcggcaaaagcagtatttaccgttgatttcggcaagaaatcgatttccggaacgctgacggagaaaaacggtgtagaacctgctttccgtattgaaaacggcgtgattgagggcaacggtttccatgcgacagcgcgcactcgggatgacggcatcgacctttccgggcagggttcgaccaaaccgcagatcttcaaagctaatgatcttcgtgtagaaggaggattttacggcccgaaggcggaggaattgggcggtattattttcaataatgatgggaaatctcttggtataactgaaggtactgaaaataaagttgaagctgatgttgatgttgatgttgatgttgatgttgatgttgatgctgatgttgaacagttaaaacctgaagttaaaccccaattcggcgtggtattcggtgcgaagaaagataataaagaggtggaaaaatga

SEQ ID NO: 285 - protein, 707 aa, Neisseria meningitidis
CIGGNFGVQPVVESTPTAYPVTFKSKDVPTPPPAKPSIEITPVNRPAVGAAMRLPRRNTAFHREDGTEIPNSKQAEEKLSFQEGDVLFLYGSKGNKLQQLKSEIHKRDSDVEIRTSEKENKKYDYKFVDAGYVYVKGKDEIKWTSDYKQFSNRLGYDGFVYYSGERPSQSLPSAGTVEYFGNWQYMTDAKRHRAGKAVGIDNLGYYTFYGNDVGATSYAAKDVDEREKHPAKYTVDFGNKTLTGELIKNQYVKPSEKQKPLTIYNITADLNGNRFTGSAKVNPDLAKSHANKEHLFFHADADQRLEGGFFGDKGEELAGRFISNDNSVFGVFAGKQNSPVPSGKHTKILDSLKISVDEASGENPRPFAISPMPDFGHPDKLLVEGHEIPLVSQEKTIELADGRKMTVSACCDFLTYVKLGRIKTERPAAKPKAQDEEDSDIDNGEESEDEIGDEEEGTEDAAAGDEGSEEDEATENEDGEEDEAEEPEEESSAEGNGSSNAILPVPEASKGRDIDLFLKGIRTAETNIPQTGEARYTGTWEARIGKPIQWDNHADKEAAKAVFTVDFGKKSISGTLTEKNGVEPAFRIENGVIEGNGFHATARTRDDGIDLSGQGSTKPQIFKANDLRVEGGFYGPKAEELGGIIFNNDGKSLGITEGTENKVEADVDVDVDVDVDVDADVEQLKPEVKPQFGVVFGAKKDNKEVEK

SEQ ID NO: 286 - protein, 15 aa, Neisseria meningitidis
YGTDEAEKFRDKSGV

SEQ ID NO: 287 - protein, 15 aa, Neisseria meningitidis
LNRWVKERIEQNQPL

SEQ ID NO: 288 - DNA, 852 bp, Haemophilus somnus
gaaacccgctttgatgccgttaaaatcagcacggatagtaataaattagaaaaagaaacgatggatacgttcggcaatgcggcgtatttagtgttggacggcagacagtttcctttggtgccggaaagtaatgccggtacgacgggcgctggcaacacaggcaagaatgagtttatcagcaccatagacggtagccatttaaacaaaacaaatcatgaaaaccacaaaaaatacaaagttaccgtatgttgcagtaatttggtgtatgtgaaattcggcagctatggggaacaaacaacagcaaacgatgcttcaaacagcactgccggtgcagcaactacgcataacagcacattaacaaacggacaccttttcctaacaggtgaacgtacttcgcttactgatatggcgaagcaaagtggtgcagcaaagtatattggcacatggcaagccaactttttaagtagcaaaggacaggttggcagtgttgacgccggtgatccgcgtaacgatagtggtaaaagccgtgctgaatttgatgttaattttggtggtaagacagttacaggcaagttttttgatgccgacggtattcaacccgccctcacaatggatagtaccaagattgaaggtaacggcttctcgggtacagctaagacaactggtagtttgcaattagataaaggcagtacaggtgcgggtataacagtaaccttcaccgatgctaaagtcgatggcgcattctacggtccgaatgcagaagaaatcggcggtaccatcacatcgaatggcacgggcgataaagtcggtggggtgttcggtgcgaaacgccaagaactatcgcaacagaaa

SEQ ID NO: 289 - protein, 284 aa, Haemophilus somnus
ETRFDAVKISTDSNKLEKETMDTFGNAAYLVLDGRQFPLVPESNAGTTGAGNTGKNEFISTIDGSHLNKTNHENHKKYKVTVCCSNLVYVKFGSYGEQTTANDASNSTAGAATTHNSTLTNGHLFLTGERTSLTDMAKQSGAAKYIGTWQANFLSSKGQVGSVDAGDPRNDSGKSRAEFDVNFGGKTVTGKFFDADGIQPALTMDSTKIEGNGFSGTAKTTGSLQLDKGSTGAGITVTFTDAKVDGAFYGPNAEEIGGTITSNGTGDKVGGVFGAKRQELSQQK

SEQ ID NO: 290 - protein, 272 aa, Haemophilus influenzae
TKKPDATTSTTANAKTDATTNAENFTTKDISSFGEADYLLIDNYPVPLLPETENSGDFATSKHYEVRDKTYKVEACCKNLSYVKFGMYYEDNKKNNKNETEQYHQFLLGLRTASSKIPTTGNVKYRGSWFGYISDGETSYSTTGDKRQDKNAVAEFDVNFAEKTLKGSLKRADSQNPVFSIEANFKNGGNAFTGTATAKDLVIDGKNSQTKNTPINITTKVNGAFYGPNASELGGYFTYNGKNPTDKNSPTASSPSNSEKARAAVVFGAKKQ

SEQ ID NO: 291 - protein, 254 aa, Moraxella bovis
VQTQFDATAIDSKTLTKTNMDTFGQASHLVIDGKLVSLLPEGVSSFADMKFINTHQIAHGDKKLSITVCCNNLDYVKFGGYGTVGGTADTPVLSDGKLFLVGERTDTSAIPTSGTAHYRGTWEGYIDSKDGRRWASSASNLTTGTRSRFDVDFGSKSLIGKLIADNGLEDNPVLTLNGTITGNGFSGTAKTGVNGFNLDPNSTGASAIAHINADFHGGFYGVNASELGGVIHHDKVGEDKIGVVFGGKRQTNTP

SEQ ID NO: 292 - protein, 232 aa, Bibersteinia trehalosi
LKDLSKSEMDTFGNATHLIINNKQLPLIAEGKQSFADMQFNDTVTHNIGGKTYRVSVCCNNLDYVKFGTYSEEDNKDSAHLYLVGERTAVSDLPSGKAQYRGTWNGVIHSHSGTVGGESPSNSESGTRSLFDVDFANKKINGKLIANDGVEERPMLSLEGEIKANGFSGSAKTHDSGFNIDPKSTAGGTEVHLDSRFEGAFYGKNALELGGIVHDSHSKDKVSITFAGKRQI

SEQ ID NO: 293 - skipped

SEQ ID NO: 294 - protein, 243 aa, Haemophilus parasuis
NTVRIIDASKIDLTNFSISELTNFGDASVLIIDGKKMELAGSEFTNKHTIDINGKKMVAVACCSNLEYMKFGQLWQQTEGEKQVKDNSLFLQGERTATDKMPKDGNYKYIGTWDAQVSKENNYWVATADDDRKAGYRTEFDVDFGSKNLSGKLFDKNGVNPVFTVNAKIDGNGFTGEAKTSDAGFVLDPGSLRHDNVKFSDVAVSGGFYGPTAAELGGQFRYQSDNGSVGVGAVFGAKQQVKK

SEQ ID NO: 295 - protein, 50 aa, Neisseria meningitidis
DNHADKEAAKAVFTVDFGKKSISGTLTEKNGVEPAFRIENGVIEGNGFHA
